United States Patent Application Publication US 2020/0329713 A1 - sequence listing, part 12

SEQ ID NO: 4 - DNA, 6648615 bp, Bacillus thuringiensis (residues 1,662,155-3,324,308 of 6,648,615)
tgacgcaatttatcaatttcatcattaatctgcgcatctttttcaataaacgtatctgtttgtggtacatacgcttctggctgataataatcgtagtaactaacaaaatattcaactgcattattcgggaaaaagtctttcaactcactatataactgccctgctaacgttttattatgagccataacaagtgttggcttttgcacttctttaatgacatttgaaatcgtaaatgtcttacccgttcctgtcgctccaagcaacacttgctttttctttccactattaattccctctacaagcttctctatagctaccggctgatcaccttgcggggaatacgctgagacaatttcaaattgacgttccaagaaaatccgacctcctcataaaaatctgtattattattttaccacgaatacctataaaaaacctaaaaaaacgaacagatattcggtaaagttttcgacaatatacacatagaaaaaggaaggagtaaatacttccttcctctactaattctattttttaggtacatatactaagtcatatccattgcgcccagcttcattcatacaatctattaaccgataagtacttcctgattcgcgctgctctttaacaatacctttacaactatctttatgtaaccctttatccttcccagcaaatttgtcttttctattatctgacacataaaatatatcgttcccactatactctaacgtttgaaaaatcgggtccccttcaagggtatactgtacaattcttattttatcaacttccctttgctcgacattcaaaacgaacttttcaaatttatctagattgagaattcctgctccctttacaatgacatcattcttcttatcaattgtagtgctagatggtgaacatgctactaaactaaagagaaatagacttataaaactggttctttttcctattgtcatcctctcctataaaaattatttgtataccagaaaagctactttcaattatgaaagtagcttttcttttcctttctccttcttcggaaaaatcacatatgaaaatgaaatcgctgtatcaactaaaaatataatcgcccacacttgactcacgcgacttgcagctttatttaaaacgattcccgattctaaccaattaccccattgttcaaatggaataaatccatacgcgaagaaaaaaaatatgtgcacaccaacgaataaaacaagatgtaatacccaattttttatttcctgctttgcataggccatacctgttaattctacctgttcttcaataataggcgccggttcattacgccatttcgcaactgatttttgtacaaatatatcaagcttctttaaatcctttttcccgtagaaaactgcatataataaaatgattacagtaataatctgaaagttagagaactttcctgtttgataatagtccactacccctaaagttaaaataaatacttcatttacgaggagtacaatccccataataaaactcgcccttttcaaacggaatccgtagcgaagtaaaaagaaaccgatagctgataaccaaaatacaatttctgccccaattaaaaaataccaacgatattctgcgagtatactcatttatccttctccctttcatcataaatacgaaaagcctcatccatatatgctaaaagttcttcttcaattggatacatgctcattttctgtgaatcttccttcgattttctaacttcccataacttatctaaaaacgcttcgtcaccattagccatttctaaacatttctgcattaatttcttcgttgcctcttgtacttcatcacttgcgacttctttaccgtctttcataaaagtacgtaattgctttaataaatctacccattctaaaacattcggatcttcctcactcatatttggcaaattctgaagcaatttttgttcttcctttgaaaatacttcattttgaaatatttcacgtatacgaggggactgttttgaaagctgaataagttcaaacataactttccaatcaagttctccctctacatctaccgaataaacaactgcttgtaaaacacgctccattcgattaaatttcttttgttcttcctgtacaaaccgaagttgtttttcaagcgaattttttaaatccagctcaccttttactaacatattcgcagcttcttttaatgaaaatcccatttctttcaaaaataaaatttgttgcaaacgaataacgtcattttcactatataaccgatgtccaccctctgtttttccgctcggctttaataaatctatttgatcataataacgtagtgtacgtactgtaacccctgtttctttcgtcaattcttgtattgaaatcactaccatcacctcttccctctcattataaaagatgacgttacgtaactttcaagcgttttgtaaaaaaaatacaaaaagctgtttatacaaagtgtataaacagcttttatggaaataaccccttttgtatggcgcgcccacaaaataaaataagtgctccaacgacaacactcgttgccgttttatgataatgggctaataataataaataatacgataaacctacagtaccaatcataatacaaatgctcggcactggattacgagaaaagttttgcattccccaaagaagcgaaaatatagctgtagcgacacataacaccggtaatcccatcccagttcccctttttctatctattattccttgttgctaacacgctcgttgatgcgatactaattaataaatcaaaaccaatccttatatatttaaacgtttactctaattgaaatctctcaagcttatcatttattttctttctccttactccagcgtaaatatttcctccaccttcactccaaaatacttggcgatttttaaagataactctagactcggattgtaatgatggttttcaatcgccactatcgtctgccgcgtcacttgcatcgcctttgccatttcaacttgcgttatatgattttgctttcttaactcttttattttatttttcacacccataggctccaccttcaaaagtaaagatatctttacttaaattataaatattttccagttataagtaaagatacctttacaaattttagaaaaacgtttcactgaacacctactctaataaagtacaagagtaattcaatttatatcagcgcaacttaaattatatcggcgatttcccaaatatatcagcgcaactccatttatatcggcgattttttaaatatatcgacttaccgacaaatatcgacatccgtagcgctactataatcataagaaaaagctgtccccaaataccttcgggaacagctttctcctctactacataaatcctagcgcatatacaagaacgtatccaagaaccgataagcaaaccgagccaatcagccccgccacgaacgctttgcttcctaacttacggaacgttttaaactctacatttaaaccaagtcctgccatcgccattgcgattagcatataagcaatgacaacaatgtatcccgcaactacttctggaataatcccgagcgaatgcactgcactcatcgctaaaaatccgaaaatgaaccatggaattggaaggtcgcgccacgatcttttttccttgcttccttcactctttccaaaccataatccaattaaaattgctactggtacgagcattgcaacgcgcgttagcttcacgataactgcgatgtctatagccgtacttcctcctggcgccgcggctgcgataacatgagcaatttcatgcagcgtggcccctgagaatacaccgtaaccatatggagataggccaagcactggatataacaacgtataaataagcgtaaatatcgtacctaaaatagcaataattgcagccccaactgccgtttcatcatcttttgctttcacttgcggcgcaattgccacgaccgctgccgccccgcaaattgctgtaccacatgcggttaaaatcccaagtttcttttctaccttaaatactttcgttagtccatatacaacgaaaatcgtaaatgtaataacaaccgctgcgatgaccaatactttcggccctgccttcgcaatatcaacaagatttaatcgcattccaagtaagatgattccaaagcgcagcaaattcttactcgcaaagttcgtccctgcaatcgcatcttgagggactccaattgcagcgcgccaaaccatcccaattagaatagcaattactaattgtcccataatatttaaaaatggaagctctgctaaatatttcgcggcaattgcgattaataatgtaatcccaattccttgcgaaaatccaaaacgcttcttcttttgtataacaagtgtttgttccattttgaaccactccaataatcgtattggaacatgcatgttctttctacttacattataagagagtttctataataagtttaataccaataccaaatctctatcattagaaatacttatgataagataatagaaaaagaaaggagcccattatatgaacgtagacattttaaaaatttttgttactgtcgttgaacagaaacacttctcccgtgcagcagaattattaaacctttcacagcctggagtaagtatgcatatacgcaacttagaaaacgaatttggcactacacttattcaacgctccccgaagcacgtccaagttactgaagctggaaacatattatatatacatgcaaagcaaatgctctctctttacgaagatgctaaacaagaaattaatgaactacataacgttgtaacaggaacacttcgcattggtgctagttttacaattggcgaatacttacttccaaaaatactggctaactatgcgaatgaaaatccacacgtcgaagttcatactttcatctcaaatacagaagacgttttgcaaagccttcgctctaatcaaattgatatcggcctagtggaaggacaagtcgtatacgccgacgtagatgttgaaacatttatgcaagatgaaatgaagctcgtcgtcccgccaaatcatccattactccgcacaaatgaaataaatgaaagtacactccaagatcaagtatgggtattaagagaaagtggttctggtacacgcgcttatagtgaccgctttattcatcaacaccatttaaaaatgaaacgattctttacattcagtagtatccaaagcgtaaaggaagctgttagtgccgggcttggcatcgctatcctttctgattggactgtacggaaagagctattagcaaaagaactattccacgtcgaagttccaaatgaacaactaatccgtccgttctccatcgtgcgcggtaaatatttcattccatctaaagccattcaagtgttcttaaatcatgtagattcttttgcgaaaaaacagagttgaccttcacattagtgtgaaggtttacaatacatgtaaaaggagtgaaatacattgcgaattggagaattatcaaaagaaactggcgttagtgaaagatcactaagacattacgaagaaaagggcttactcccttctaagcgccttgcgaatggttaccgtgattttgatgaaagtgccatcgaaaaagtggagcttattcaaatgtacttacaaattggcttaaatttagaagagacggcaaggatgctgcgctgccttgaaattgaaccgcacctgtacgacaatccgtgcagcagtatccttacgctttacgaagataaactcaatgaagtaacaaagcaaatctcattgctttccaacatccaaacgaatttgcaaaaacacgtttcactcctaaaacatgcaaaagaaaagggatgattacatgtttgttatacatggcagttcaagacaaaacggaaatacagaagctttaacacatatgatgatagaggacattgaaacagaacaaatttatttgcgtgatcatactgtctatcctattacagaccaacgtcatgatgcagaaggattccaatccgtaaatgatgactatgagcagttaacgaaacgcatgctagaacacgacacgattatctttgctacaccattatattggtacggaatgagtggacatatgaaaaattttgttgatcgctggtcacaaagcttgcgcgatacatcccttcatttcaaagaaaaaatgaaaggcaaaaaaatgtatgttgtcatcgttggcggggacaacccaaaggtaaaagcattaccgcttattgctcaattccaatatatctttgattttgttggctcttcatttgaaggttatgttatcgggaatgcgaatggactggatgaaattaaaaacgatgctgaggcgctggcaaaagcacaattgtataatgatacattcaaaaatagcgaacagaaataagtttgacaaacccttttgtatgcgcatacaataaaagtaatattatgaaaggaaggtactttgaccaatgaagttctaattctcttatttatttcatccatcacaaatagtgaacaaaaatgatgaaaactagcaggggattagtctgtccatttgtcgatactttctttcgaaacgatcatgtaaaaaatcgtttatttatgtacgatttttttacatacaagggcgacgtttatcctctctagtgaaactagggaggtttttttatgactattttattcgcaagtaatattgaaaagagctttggtgatcgcacactatttacattaccatcactggaaattcaagcacaggatcgcataggaattgtcggagtcaacggagctggtaaatctacgttattacaaatattaagtaaagaaatagaagctgacagaggcatagtaactcatcatagttctatcagcatcattcctcagcttagcgaagaactaccggaaactgcttcttctcttgcaaaaggaaaatggagtatttcaaacgttaccgacgcaatgagcggcggtgaacgaatgcggctaaagatcgcccatgctctcgaacaaaatgcaggcattttattcgctgatgaaccaacaagccacttagatatggtcggtacagagcaattagaaaaggcactttcgtcttataaaggagcacttgttttaatatcgcatgatcgtgaatttctagataatatatgtaccaaaattattgaaattgaagacggtactattcaagagtacaaagggaattattcaaactatcgaaaacaaaaagaacgtgaacgaatacaaaaacaagcagaatatgagcaatatgtacaagaaaaaaatcgtttagaacagtccattctacaaagaaagcaacgtgcttctaacatgacaaaaatcccaacgcggttcagttcatctgaatctagactttataggttaagtggggctcatggccaagaacaggttagcaaagcagcgaaggcattagagacacgtctcgaaaaactagaaaagaaggaaaagccaaaggatctttctcaagctcaatttgacgtgcaataccatactcccattcatagtaaggtggcagtacaattcaataaagcaacaaagaaaataggcgaccgcacactatttaaaaatatgaatggaactattgcccctggtgcaaagcttgccgttttaggggcaaatggaagcggcaaaaccactttgttcaacatgcttctcacaaacgagcgtggcatgcagctatcgaaaagttgtaaaattggatacttcgaacaaacattatctattttaaaaacagataaaaccattttagaaaatgttctagaagaaacaaactatacagaagcattcgttcgcacaatacttgcacgacttctattccgccgtgaggatgttcataaacctgtgcatgttctaagcgggggtgaacgaatgaaggttgcactcgcaaaagtatttttaggaaactataatatgcttctgctagatgaaccgacaaactatttagacttagcaacgcaagaagaattagaaaccatgttacaagaatatcctggcacaatacttttcattagccatgaccgtgcctttattcgctctgttgcagaccatattctacaagtagatgagagtgaaccaagaatcttccacggtaattacgagcaatacacaaaaagaaccaccggagcttctgtaaacgctactgagcaagaattgttacgattacaaacaaaattaacagaagtcatcggccggatttccattccaaatcatcacgatgacatcacatctctcgaacaagaatacgcaaaattattaactcaaattcaaaaatgtaaagaagcgctctaatgtcttccctatatatcgacggggccttccacatttcccaagaaatattgaaacttcgacatacaaagtaaaaagccgtgcatcagcacggctttttactttatatgcggacagcagtcccgctcaccgcaaccattaacataccttcgcgaactacttcgtaatccacgtcgataccaacaattgcatttgcatttttttgtcttgcgaaagttttcatctcttccattgcgatgtcgcgtgcttcttttaatttactttcataagcgccagcacgaccaccgacaacgtcacgaacagaagcgaaaaggtcacgaacgatattcgcacccataatcgcttctccattgacgatatcgatatactcaataatttcttttccttgaattgtagacgttgttgttacaatcatactttatagcctcccatatgagatttttacctacttatggtgcactaattcagtacaaattatatttacgaactaaactgagcttcgtataacctactgtatcctccgccttgctcaattaattcattatgtgaaccttgttctgcaatgccatctttatttacaacgacgatgcgatctgcatttttaatcgttgcaagtctgtgagcgataactagcgttgtgcgaccgacagctaattcagcaagcgatttttgaatcgcaagttctgtctctgtatctagtgcagaagttgcttcatccaatattaaaattggcgggtttttcaagaacatacgagcaatagctagacgctgcttttgtccacctgaaagtttcacgccgcgctcaccgataacagtatctaaaccttccggctgtgagtaaattaaatcttctaactgcgcacgttttactgcctgccaaatttcaggctctgatgcctttaaatttccgtaagcgatattttcacgaattgttcctgaaaataagaacacgtcttgctgcacaattccaatttgcttacgaagtgaagataatgtcatatctttcgtatcaatcccatcaatttgaattgatccagatgattgctcataaaaacgtggtaataggctacataacgtcgttttcccagctcctgatggtccaacgaacgcaaccgtttcacctgcatgtattttcaaactaatgtcatttaaaattggttctttattttcatatccgaacgtaatgttgttatattgaatatcaccatgtacatgtttaacttccattgcatctttagagtctacaatgtcaggctctgtttcaagaagctctacatatcttttaaaaccggcgattcccttcggatagctttcgattaccgcgttaattttttcaattgggcggaagaaaatattcgttaatagaacgaatccgataaatccaccgtacgttaattctccttgcagaacaaaccatgtaccgcatattaagacgaagagcgttacgagccgcatgagcatataactaatcgatgaatttaacgccataattttatacgccattaatttcgttgtacggaaacgagcgttgttgacagcaaattgctctttctcaaacttttcatttccgaatgcttgtacaacacgaattcccccaacattgttctcaatgcatgcattaaaatcagcaacgtctgagaataaacgtctaaatgtacctgtcatttttttattaaagtaaagtgctaaccataataggaatggaatgacgaagaacgttaataacgctaacttccagttgatcatcatcataaatgagaatgccccaactaaagtcattacggcgataaatagatcttctggtccatggtgagcaatttccccaatttccattaaatcgtttgtaaggcgtgaaattaaatgaccagttttattattatcaaaaaatctgaatgatagcttttgaatatgatcaaataatttctgcctcatatctgtttcaatgttaacaccaagcatatgtccccaatatgtaacgacatattgtaagcctgcatttaacatataaactgcgagtaaaccgaaacaagcccataaaataagcgtccagttttgccctggcaataacttatcaataaattgatttacgataagcgggaagccgagttctaataatcctgcgacaaccgcacaagaaaagtcgagtataaataaacctttatacggtttatagtacgagaaaaatttacgcagcatatcttacctccattttccaaaattaaaaagactccctaaatgataaccattatcaaataattattcaagttatccgtctatgaaactgaaaataagctttgcgatagttgtcgttttttgctggaaagtcgatatattcgaataatcgccgatatatttcgagttgcgctgatatattcggataatcgccgatataaatttcatttactaactacccttcccccaaaaaaacaaaaaaggtatcaccacaaggtgatacctctccttctattacatcgcttccgaatcccactcgtgctcctgctcaacgaatacaatacctaattcgtgatgcccaccaacatataatgcagtttgtgcaagacgaagctcaccatttgtatctaatacttctaatttacaaaatgctcctgtcgtcttcgtttgaagcgcatcataaaattcctcggcgctttttggaatgactccatttactttcgtaataatttctccaggcagtaattttagctctgctccaattgtatttggaattgtatctagtacaacgagcccatcattgcgtgcagcaaaatatgctggtcttgtttcatcggcaattttctcttgcatcgagattgtgaaacgcccaagcattgcgactcccatcgcgataattgcaagtacgtgccaccagtaacttgcgactcctaaaacgagcacaagtcctgctaatccataaacacgtcttcctgtaaataataaggcttccgtcggctcataacttttaatctttctcataaatccaattaaaaatggaacgaggaatagagaatatgtatttgaaccgattgaaacgacaggccaccatgaaataaactgcgttaccgcatcacccggtacaagaataaaaataggaacgatccataaacgctttgattcgtgtaaaccaatctttaatccacgcttccccttcctaatcctcggcgtcgaatatcctactgcgtttttagaaatcaataagccttctacaataagcataacgcctagtaaaataacaagggatacaatggtactctcttcaccttctcgaagctgtaaaaaggaaactggtagcttagaagataatagaacacatacaatcgcaatgctaaatgtataagccgccgataaatatcgatacatagccgttaatccaaatagtaacgtccaaattaaaatggcccataagctcgctttagaaacaacaagtccaagcccaatcgtaacaatagatactactaatccgtatccaatcccttcaaatagagaggttcgcagttcaaaccaaatatcataaactttaaaagaaaaatcttttcgttctcttaacatacgtaagtatccaacgaagatactacttattacaaatatatagacagcagggtgtaagaaaaaacgtccaactgcccgcattatttcaaaaatccacgcctccatgaactcattcaccaccatttatatcattctttctttttatattatcataactaaacaaacgtttgtttaacacaaaaaaatacaggcagcaaactgcctgtatttcttcttattttgccattaattttaatgctgactgtaattgtagatcattttctccagaacgaattttttcgataattttagtttgaatcgcttcagctgtctttttatcaagctgtcctgtcgcttccatctcatttgcattttggaatgctttcagagccgattctgtctctttactaaagtatccatcttcacgacctggtacataccctaagctcttaagcatttcttgagcatgttttacttgtacatcatttgaattgtatgaaagtgttttttcaatttgaattggtgtcgcatgataataatttggttgcttcacttctactgttggcgcgattccttttttatgaatccagttcccatccggtgttaaccatttaaacatcgttaatttaatgttgctgccgtctttaaatggaacagcttgctggacagtacctttaccaaatgtcttttcaccaattaaatcgtatccttctccttcttttagcgcacccgctaaaatctctgaagcagaagcacttccattatcaattaatactgaaattggatatggttttctctctttcagttccgtagagaatttcttcttctcaccatttcgctgctctacttgtagcatcggctttttattcgtcataatttcccctagtatatcttctacactatttaaatagccaccaggattaccacgtacgtcaataactaagccttttatatttttcttctctaactcttttaactgatccttaaattctttcgctgtattttcagcaaaagaagtgatttgcatataaccgatatcttttccactctcttgcttcacagaactaaatactgtaaagattggaatcttttcacgcttaattttaaatacgatcggatcagttactcccgcacgtttaatttcaattgcgacagtcgttccctttttaccacgaatttttaatactgcttcttcacgtgataagtctttcacactgtttccatctacagataaaatttggtcattcggtttaattcctatcttttctgctggtgaacctttaattggcgatacgataataagcttaccgtccgtcttgttcacctcagccccaatcccctctaattcgggatcaagcgattcactaaactgtttggctgtttctttatccatatacgtggaataagggtccttcagcgtagacaacataccttgtattgcaccttcaactaacttttcatctttcacgtcttccacataacgtgaatcaattagtgcatacgcctcattaatttttgccaaattcccttgcgcagtgctagcattcccactcgaaattgtttgcgttacttctgatgggttaaccccaaatacagacatgcctgcaaacattccgccagcaccaattaaaaatgcaacaaccattccaataattgcaactctacgtttcaatgcggaattcccctttccaaaacacacaggtggtgtagcaaaaggcatcacacagtgtgtgatgcctttacctatttctactatatgataagcttgtacgaattatgtttgcaactttttatacttttaagaagcgacgaattgacattacacttccccacataccgattaaagcaccgattaacactagtaaaccagctaattggaatacgaacggactgtatggtagaagctcgaaaattgttccgccaagtttttcattaaacacaccttgcaacgaattatacgtaattagaattaggccaattggaataattgatcctaatactcctaagaataatccctctagcaagaatggccaacgaataaaccagtttgttgcaccaacaagtttcataatttcaatttctgtactacgagcataaattgtaattttaattgtattagagattaagaacatcgctgtgaataaaagaccagcaattaacgcaatcccaatgttacgaccagtttttacagtatcaaataatcgttcaacttgcccttttccgtactgaacattactaacaaactgcattttttcaaccttcttcgcgattgtcgctgtatcggttggctcttttgcttttacaacgaatacgtttttaagtgggttatcttgttcaaataactcaaacgtttttccactatcacctaagcttttaattaaacgttttaactcttcttctttagaagaatatttaatagaatctacttttgcaatcttactcatatcttcttctaatttcttttgatccgcttcttttgcagctggatcaatgtgtacacgaatctctacatcttgctctactttcgtcgcaaaatggttcatattcataatcgctgttaaaaagacacctacaagtaataatgtaactgttactgcactaacagaagcaaatgtcatccatccgttacgtgatagattctttacaccttctcgcaaatgtcgactaagggtcttagccttcatatccgtatcctccctcaatctcatctcgaacaatttttccgccttcaatcgcgattacacgatgacggattgtatttacgatatctgcattatgcgtcgccataacgatcgttgtgccgcgctcattaatgcgagtaaaaatattcataatatcaagagctgtttcaatatctaagttacctgttggctcatcggcaattacaacctttggtctatttacaattgctcttgcaatagccacacgttgttgctccccgcccgaaagctcacttggaagtgcgtctgcacgatcttcaaggcctacaagacctagcacttctgttacacgctcacgaattgcatccggttcttcttcaattacttctaaagcaaacgaaacattctcatataccgttaatttaggtagcaatttaaaatcttggaaaattacgcctaattgacgacgaaaatacggaacgtctctttctgccaatgtttcgatagtaagtccatttacattaatagatcctgtagatggtttctcttcacgatacatcattttaataaatgtagatttcccggctccactcggtccaactacgtatacgaattcaccttgtttaatgttaactgtaagaccagcaatggctttcataccattcgggtactccttataaacattcgtcatttttatcattatttatcacccaatacttaatgatttttttcgaaatacttttctgtacatctgaaaataaaagacatccttcattttcatttattcatccttgttgaaggtagtttacttatgctttctcataagcaataccactctatgtaatatatttcagcaaaattctacaaaccccattgtaacatcaaacggtttccaatttggatacatttttgttacagttatgttacataccagaaaaaaggaaaacgagttgactatattatcaactcgtccatttcaccttttttatttatgttcagctaaccattcagatacttttttcgcatcttcaccttgaataagtcctggtgacattgaaccgcggccttttttaataatctcttcgatatctgcagcgtcgtacttaccgcctacttttcttaaatcaggtccagttgcccctgataaatctgttgcgtgacatcccgcacaacttctttggaaaatttgttctgcgctgtctgtgcttgcagactgtttcgaagacttactctcttctttatttccgcatgctcctaaagcaaaaacaaccgatgtccctagcgcaatagccaacaatttctttttcacttctatcgctccctattgttgatattctttttattcctaacacactcattttcattataagcattatctttatatagaaaaactaaggtgtatttcatattcctcaaaaatacagtgagaaccttgataaaataaagctttcataagttgtttcaattctgtgaacaactaaaaaaacttctataaagtatcctttttaaaaggaaaattagaaaagttctatataaatctttaccctattaccgctctattttactattctctactttttacaaaacaatatacagcattgtaatctacatataatcccatcaaaaagagaagttgtcgtttccaacttctcttcctctttacttcatctataaaaataaaatcaaattctttatatcctctattgtcctcagcatgcgccaacaatttcgttggctttttttcgcttattagatgcgagaacgtaagtaagcatcaataaatggatcaatctctccatccataacagcttgtacgttaccaacctccgtatttgtacgatggtcttttacaagagaatacgggtggaatacataagaacggatttggctaccccatccgatttctttttgctctccgcgaatttcatctaattctgcttgttgctcttctagtttcttttgatataatttcgcttttaacattttcatcgcatgctcacggtttttaatttgagagcgctccgactgacatgttacaaccgtatttgtcggtgtatgtgtaatacgaactgctgaatctgtcgtatttacgtgctgcccaccagctccacttgctcggtacgtatcaatttttaaatcttctgtacgtacttcgatttcaacttcatcattgaactctggtacaacttcacaagatacgaacgatgtatgacggcgccctgaagaatcgaatggtgaaatacgtacaagacgatgtacacctttctctgcttttaagtaaccgtaagcgttatgacctttaattaataaagttacactcttaataccagcttcatcacctggtaaataatcaaccgtttctactttgaatccgcgtttttcagcccagcgtgtgtacatacgtaataacatagaaccccagtcttgtgactcagttccacctgcacctggatgtaattctaaaatcgcattatttttatcataaggatcacttaatagtaactgaagctcatactcattcatttcttgaattaagccttttacttctgattctaattcctcatgtaaatcttcatcatactcttcttttaaaagctcatgcgtgatttctaaattttcgaacgtctcatctaactgacggaactttccaaccatatcttttaacgcattcgcttcattaattacagcttgtgcgccttgttggtcatcccaaaatcctgcgcccatcattttttcttctaattctgcaatttgtttctccttagtagggaggtcaaagagaccccctaaaagccgctaatcgcttagccattttctctaattcctgtctaatttctactaattccatttccttcacctctatgtaattgctgttactttcgtatgaaaacaagggaaactctctccacttattacggagagagtttaatccttcttaattatacatttttgatataaaagtttgcaaaacagccaaagctaccgtcctatattactgaacgataccacagcagtttttatattttttaccgctaccacatttacataaatcgttgcggcccacttggtcaccttttacaactggctttttctttgcttcttcgccatcactagaaggatgaacagcttcaccttgcacaacttcttgacgttctaagttttgttcaatttcagctttcataatgtaacgagaaatttcctcttcaatagaagcaaccattgactcgaacatcgcgaacccttccatttggtactcacgaagtggatcgatttgaccgtaagcacgtaaatgaataccttcacgaaggtgatccatcgcatcaatatgctctgtccatttcgtatctacaacgcggaatacaacaaccttctcaaactcacgcatttgctcttctggcataagcttttccttttcattgtatcgctctattaatttcgcgataatcggttcgctcatttcctcaggagcaaggcgacgtaattcttcttcttttacatctccgtcttgaagaaggtttgtatttaagtagtcaacaagacctttaatgttccaatcttcttcaatttcctcttgtgtatgaagggcaacagcacgttctactgtagatttcatcataccttcaataatgccgcgtaagttgtcagactccattacctcttgacgctgtttgtaaataacttcacgttgttgacgaagtacatcatcatattgcagtaactgcttacgtgcatcatagttatttccttcaacacgtttttgtgcagattctaccgcacgagaaaccattttactttcaatcggctgagaatcatccataccaaggcggtccatcattgctttcatattatctgaaccaaatcggcgcattaattcatcttccatcgataagtagaactgcgtaacaccagggtccccttgacgaccagcacgaccacgtaactgattatcaatacgacgactttcgtgacgctctgtaccgataactgctaaaccaacgtttttcacatcgtctccaagcttaatatctgtaccacgacctgccatgttcgtcgcgattgttacagcacctttcataccagcctctgcaatgatatctgcttcacgagcatggtttttcgcatttaagatgttatgacgtacacctttacgcgttaacatttttgaaataagctctgaagtttcaattgcaactgtacctacaagaacaggttgtccttttttatgacgatttacaatatcctcaacaacagcattgaacttaccttccattgatttaaagattaaatcggcacgatcatcacgaataatcggtttgtttgtcggaattacaataacgttcatattgtaaatgttacggaattcctcttcctctgttttcgctgtaccagtcataccagataatttttcatacatacggaagtagttctggaatgtaattgttgcaagcgtcatgctttcattttgaatttctacaccttcttttgcttcaatcgcttggtgtaatccttcgctataacgacgacctttcataagacgaccagtgaattggtctacaattacgatttcgccttcttgtacaacataatctgtatcacggtgcataacaacgtgtgcacgaagcccctgattaatatggtgaagaagtgctacatgttttaaatcgaataagttttcaatatggaaagctttctccgctttcgtaataccatcttctgttagcattacatttttcgttttcacatcaaatgaataatctttttcattttctaacgtacgaacaaatgcatttgcaaacatgtatagctctgttgatttttgagcttgtcctgaaataataagcggcgtacgtgcttcatcgactaaaatagaatcgacttcatcgataatagcaaagtgaagtggacgttgaacgcactgctctttatataaaaccatgttatcacgtaagtaatcgaatccaagctcattatttgtgctatacgtaatatcagcagcataagcctcttgtttctcttcgcgtgacatactatttaagttaattcctaccgttaagccaaggaactcatgaagttgtcccatttcgctcgcatcacgttgtgctaaatattcattgactgtaacaacatgaacaccttttcctgttaatgcatttaaatatacaggtaatgtagatgttaacgttttaccttcacccgttttcatctcagaaatattcccttcatgtaaggcaataccacccattaactgtacgccatatggacgcattccaagaacacgagttgccgcttcgcgaacaactgcaaaagcttcaggtagtagatcatctactgtttcaccttttgttagacgttctttaaattcaagcgtctttccttttaattgttcatcagttagtggcttaatagatgactctaatgcatcaatttgctcaactgtcttttgcatacgtttaatttggcgttgatttacatcaaacaccttttttaaaataccgatcataggaaatacgctcctctttttattaaaataaaacttccgattgttttctttttctctattacaatcagtcgttataaaaatcaaatgtatgttatgccaatttttctcctaattaaaaaaactaaaatgtatatacctaatgataattgtaacacttgtcttataactatgacaacaatcggcaagatgtcgggccttatattcaaaaaaagtttttatttcatttgttacgttccttttctctgtctcgctatttcaatttcacgttacaaatttcgtattaaatctaagtcatattctttcaagtttcctttgaaagaatatgactaccagaaattccttaataaaatctaaatcaacaattacaaaaagccggaaactttgcaggtgtagcatccatagatacttacacctacaaaaaaactccgactttaaaagatattgttatgttgcaaaatctacaaataccattaacatatagctgtatcaatcataaattttattaatttatcggtatttccaattcatgatatttccctttcctatccttcataaaagaaatgaatttcactttagttgattcatttgaaaagtttttataatttttataagggtcatctcctgtaaaataatttgtccctatataccctcgtaccgttttaccagcaggtattacaggatcaaactgatattttttaggtaattccattgaataagggattaaattataaaactcacctattttagaataaaacattgtatcggaaatagacttattactaagcaagttaatatctcgatttgttgtatttgtaatatctaaaggtaacacatacgtcactacttcacggtcttcatagggatcataaacttttgtaggatcaagaggatcaagtgcatgaaacgtaattcctcgctcatcttcaaaagttctattagataaaaactcatcttttaccactttataagattcattatttagatttaatgttttaaatctaaataaactagcaaatatacatagcaacagacacaatccaatacttattaagatatgttttctcgtcactcttaatctaccaactttccattattaacatgtacaatacgatctaccatttcattatctagaacatgcacatcatgactggctacaacaatagtcgttcccttggctttttctactttcaaaatatctaaaacatcttttatcccatcactatctaaagcattagttggctcgtctaataacagtaattttggttgttccattaaagcttgcgctatccctaaacgttgtttcatacctaaagagtatcttttatactttctcttatctgttttatcaagtccaaccctttgaataatattataaatctcctcatcggagattttattgttaatcgatgataaaaatttcaaattctgaaaaccagtataccctggaataaaacttggatattcaatcaatattcccatagaatcaggaaattgcttttgttttccaattatttcattatctatataaacaactccagaattcaagcgcattaaccctgatatagcgcgtaaaatcatcgttttaccagagccattatgccccttcaaaactaaaaattcgcctttttttactgacaaactaatattatctaacacaatatttccttttaatcttttcgtcatacattcacatttaatataattgtccataaattattcacctatcacatctagttttttaaaacaaaaactacctaataaaatcattacaacaacaattactactcctattaaaagtaaatcattatattgaatagattgattattacctaaagtcaattgaattgaactgtgatcaacaaaataccaacgatttggcataacaaaagagcctaaaaaataaatactatgaaagaaaatagacaaaaataggtacaacaacattagtacaaaaacaatagttatcggtatataaaaagttaaaaactcaaaaatcaaagctaataaaaagcttataattatttgaattagcatagtacctaatatcttataaggaaattgactatataaatttaaaaaattatactcgcctaaagaaagcaaatagtaagcgctaaaccaaataaaatacataccaatccaaataataattatataaaaaaacaaagataatattttcgttaaccacagaaaatgcttcttcttaacacgaggaaataaataaacaccattctgttgaatatctgaaaaagcaaaattccctacaagcaacaaaggagtgatttgaaagaatatccaataaaaagggatagaaaatcgcccctccttataaaaataagataaatccacaaaatctactccatgaaaaaatcgataaaaggtaacatctactaatacagattctttaccattactaagaggctgattgtataaaaaggcaattgcaataatagcgtaaattaagaataaaaaaaccattatcttgatggaatctcgaaaccttacatataaatctctttttaacaaataatataagatcataatgtaaactagaccacctctgtctcatcattcatagaaatataactttttttagataaaatccatacacttataaaaaagataaaaaaacagccaaataagcgtataaataaaccagtagcatcttcaaagacatttatataaaaagcatttgtaaataaaaatccatgtaatataaatctatctaataaaacagcagtaatcatacatattattacaagtaaactaggtaaaaataattgcaataaagcacttatcatacatataaaaacactcgcaaataattgaatgcaaaataataatggataatttacatcaacactagttacagccatcatagttgacatcaaaaacaactgtaaaatcatactcccagcaaaaaagtaaacaaaaacgaataattttaaataatatatagaaactaatttcaatgcattattcactctgtaaacaacataaatactaaaaaagttcgacatagaatatacagaaaaaacaattgttaaaggaataaatatagtcgacaaattatacaacgaaataaccttatacaaagcttccaattcgttcattttctcttttacaattccgggttcaaaataattgaacaagcaaccaatgatactaacattaagtacaaaaagaatacttaaccaaacatatttcatccttatagtttctttcataacattataaaagaacatgcttcctactcccccgtaaataaagaactacagaacaaaaccaaatacataacagtacactaagaaaaatttgcaattcaaaaaagccaaaatctttaattaaataatctttaggattgagaatcccttttccaataccaagccaaaaaatatgtaaaataaatggaactaaataaataaaataaactcgttttataaaaaacgaaactgataaagctaaactcgaaaaaaccgcaccgtataaaccatttaaaaatacatacattagaaaatataaagtagggtacttataataaactatatgaaattgagctgttggcgaaacagtagaagccatataatttaatattggatgcggagcaactgttggataagtcatcacatataaataaaaattaaatagtaaagggacacttataataaaaaaagatacgctaaaattaataaaataaagcagcttaaaataataacatgttcccatcttagaaataacaggataaataaatccataatttttatcaattctataaatccctgctacagccattgcggaaagcataggaaatataagtaaataaaactcactataaaacgataatctattaaaatataaaatattagataaatatggggatacctttataatcccagcatcgttaaatcctttagttgtcacaaacatagcaatatattgagcaataacaattactaacataataaataaagacaaccaaaacatcctaccttttaaaatccttcctaaaaagtaactcatctatagctcctccataaaccattaaatttaaatcttttttaatatgaacaattgatccgcaacaccataacatttcttttctttatttaaccaaatgtaacgaaaagaaacatttgctctctctccttcaaatttaggaaactcaacttcatactgataaacatcatttgtgccttttctttttacactcttaacttcttgtttccactgaattacttctccatcagtttgttcaatccgtcccaagagatacgttggttttttcttattcgtaacacccgtcaaaaaaacataataattttctggtataactcctaatttcaattttttatttgaaagcttatcctctattaaactatcatttttttctatttgtccttgaaagaaatcatcaccattttcactttccaaaaacacttgttcaaaaatagtatttttgttaattccttttaattcaatacttttcaaattatctttttccgttaaagtatcttcaatatgtacaataggttcatctactttcttttgacaagaaactaagaaactaatactcaatataaaaaaacaaactaaaatatattttgaaataaacctcattacagctcctcctattttaaaaatgaaatagcaggaaaagtcgtataatccggatttgaaactatacgactttttctagcactataaaataaataatttcaatttataatttctaaatcaatattcaatgtaaggtccactatgtcttacactatcaggactccaagcagtaggataagcattattttctctagaataaccaccaaatctcacaggcacatttttcccatggttttcatatgcataattttgaaaaagatatgttctacctggtatcactgttccttcatgcttacctgaaacatttacccattttctatcttctgcatttttatttttatctgcttctgtccaaacattgaaagaacctccgcccttctcactgctcttcacacgcatatacatagaggtaggcgtctctttaggacgtgcattagtataatcatatggactccaaagtctaaaggtaaaattcacatggtcatcccttgtactagccttagccggttcggttaaagcgaaagtactagctaaaatacctaacgataaaacagatccaaacataaaacgactttttttcttaatgcccactaaaagcacctccgataatttgtagcattatattgattgtatttttccactgaaggaacaaaatcaatataatacaatattatggtaacaacacctcaacacaccttcaatggatttcagaatatttaatattacttttacacttgcgaacatttcgttaaatttttaaaaacaatactatatccctagcaaagaattacttgtaaaggtagctacattcctatgcctgttccaaataataaagagtaactcacctctctaagtttcgaattttctcctgctgttttgaggaaataccgcctaaaaatcacttcttaatgaaatcggctacttataaaacttttttaaccttgctgcgaaaaatacaaaaaaagcgcagccatttcggctgcgctttcgaattattatttagtttcgattaaaccgtatttcccatctttacggccatatacaacattagtttcgtttgtatcagcatttgtgaagacgaagaaattatgtcctagcatatccatttgtaggattgcctcttcaacgtccatcggttttaaatcgaatcgttttgtacgtacaagttctaattcatcttcttctacctcatccaaaacagctactgcttctggaaggataaagttcgttttcatagaacctttctcacgtaacttacgatttacttttgttttatgtttacgaatttgtcgctcaattttatcaactactaaatcgatagcagcgtacatatcgctattagtttcttctgcacgaagtaataaatcagtaaatggtattgttacctcgacacgttgcttgtcagagtatacttttaaattaactttaatctctgggaatgtatcaaaataacgctctaacttacttagttttttctctacatattcctttaatgctggagttacttcaatattttcaccacgaatgttgaatttcatagatgaattcctcctttcaagcctatgtattataatttcgacattggcttaaaaactccttctaacttttttaaaaaaattagtggaattgcgatttttttatcgttttttgttgaaatgaaaagatgcatcgtttctatctttattttatcctattaacatcgtgagtaacgaatataactgtggacaattcgttacagaaaagaaacaactttttgacaacttacactataacaaaaaccccttgcgaaaaacaagaggttctactacatatatataacgttgccacaaacgcagctttctcttccaaaaacaatataccctacagtttcacaacattagctgcttgtggtccacgtgctccatctacaatgtcaaactctacttgttgcccttcttctaatgacttatatccatcttgttgaatagcagaaaaatggacaaatacatcgtcaccatcttcacgctcaataaacccaaatcccttttctgcattgaaccatttcactcttccttgcatgttcattccattcccttcactctaaaaatcagggcattcgccccatattttgactataacgaatgacaacatatgaagtcaaagaagacttatcgcctttttattatccctttcgacactgccatattaacttctacaaagtgtcaaactagatacttctcttgcccctctttcatataacaaacttccgatttgcctaactgtaatccctgtcgtatacacgtcatcaacgagtaaaatatgttgctcagaaaacatctcttctccctgaaaataaaaaggattgcttcctgacaccctttctttacgtgtcttcttactttgcttttctgtttcccttcttcttaatgatggataagaaattttgacaggcaaacaagttgctaataactcagcttgattaaaaccacgttcaatttccctttccttactaagcggaacagcgataacggttgaaacattggcaaaatacttttgaaataaacttcgaaaaggacgataaaaaatgtgcactaactccgcatccccccgaaacttaaactgtgctactatttctttcatctcatcatcatacatatataacgaacggtttttaaaagaacgatacttctcctctttcgtccaccttatacaatctatacaaataccgtcttcttgaaatgcggcaggaacaaattctaaaggtcgcccgcactccatgcaaatttctcctataatataggaaagtttctgctcacatctatcacatatatattttctatgacactttacaaaaaaagtgtaccaactaatcttttctacaaaacactcatcacaaagtaaacaatgcattaatcgatcaatccttgttctttcgcatttttattcataccttgaatatgttttttcgcgcgcaccatcgcctctgtcttgccatagtgaaaataaatgacctctccatacggtgcttcaaagctccgccctgctcggcccgcaatttgtacgagcgcactttctgaaaacatttcttcttccgcccccaaaactgcgacttgcaaatttttcaccgttacgcctcgctctaaaattgtcgttgtaactaataatgggatttctccctttttgaaagccgctactttttcttttctccctggatcttctgcatgtacaccttcaattcgattgtttaatggttttaacaacaagcttatttcttctatatatcgcacatgggggacgaataaaaaaatagggaattttttatttaagtatgtttgtaaccactgtagtaaaactcgaggaattcttttatgaatgaggttttttttccaattcccgcaccaacaaaataaaggaactggcaaaggatgacgatgatatcgtccagaaacaataacacctttttgtttaccttgtttaagttttcgcttccacgtttcatctggagtcgcagttaaataaatacgcgccgctttttctttcatcgcttgttttaccgcgtactgtaacatttgatctgcacaatatggaaacgcatctatctcatctacaaccatgacatgaaacgccctataataacgtaataattgatgcgtagtcgcaacgactagtactgcatctttttctttatccacactccctccatataaagccgctacctttatatatggaaatacttcttgcaatctcggtgctaattccagaacaacatccgttctcggcgttgcgatacaaactctttctcctttttgaagcgcttcgttaattccgtaaaacaacatctctgttttcccagccccgcatacagcccaaataaaaaatgattctttttgcttaatagcctctataactccttgcgccgccaaattctggccagtagacaacgtcccgttccactgtaacaaatttgaattcttttctctctttctttcagcaatcccgcgaacaagtacagcacattcacttactctccccatcgttatacacttccggcaatatgcgcacactttactgcaccttttacataaaaacgacgcaaatagccgccgatctacatttccgcagcgttggcacatatatttagaattcttcttttttacaccttgtacacatacgatctctcccttctttttcaaatcgtttaattccctctgtaaatctgaagaaagttcttctaatagcaactgtttccccgctagcatcaacaatcacctccagcactactataaacctttctcatcatctcgtaaaaactcaaaaaagccgataacctacttataaaatagtaagctatcgactttatacacggtttttattcttttataaatcctagaatcgaccgtatcctaagaaatgtttttggttatacgaactgttaatatcaccgtacgcaattcctttatcgctagcatggatcatttggccattaccaacgtaaataccgatgtgagatggacctgctttataagtaccttggaagaatactaagtctcctggttgtgggctatctactttagaaactgagttccagtaacccctaacgtcttgacgacctacaccaaagatgtaagaaatgaatccactacagtcaaaaccaccgtttgatggagatgcacttccccaaacatatggtaaacctaagtagctttgcgctttaccaattacgccacccacatttggagctggttttttctcttcttgtttaggtgcttcttttttaggctcttctttcttaggctcttcctttttaggctcttctttttgagcttgtccaccattgtttgctggtgcagcttgctctgcaggtgcttgtgctggttgagcttgcgcagctttagcagcttgctctgcttgtttttgagcagcagcttcttgtgcagcttttgcttgtgcttcttcttcggcaatgcgttgtaattgtaatgcttgtttctcaagctctttcaattgaccttccgtacttgtcattgaagttacaactgtatccattttaccgcttaaatcgtttaccgctgttgcttttttctctttttcagcgtcaagttctttcttagcagtttcaatttgagcttgtgcttcttttaattctttttgtttttcttttaccgttgcaacatcttttttcacactagcttggtcttcttgttgtgttttcatgatatcttcatcagactcaagaattttagaaacagaagttaaacgatcaactaaatctgcaacgtttttagagtttacaagaacttctgttacaacgttcgtatttggttgttcttgaagtgcaactaaacgctttcttaatagctcttcacgttttgcaatctttgtttgtaattctgcaatatctttatttttcttttcaattaattgctcagtatcagaaacttttttcattgtttcatcaagctttgcagcattctcttgaacagatttatctaaaccttgaattgttttgtttaagtcattcatttgtttttgtaattcatcacgttcttgttgttgtttatgtaaagtgtcattttgtgtgttaatttgtgatttcacatcagaaattttatcttctgcaaatacatttggtgttagcccagaaaacattaatcctgcaactaatgcacaagatgccatttttagctttttcattttattttttacaccgctttcttttttctttttccgtatataacctataaaatttataccataattcgggattttttttgctaatgttacgtttttgtaaaacaaatgtaatattatatgtagctctagcgcaaaatgcgtatatttttgtatgtatgtgtagaaatttatatacttttctcacttctataaacaaagaaaaaacgtaaggaattccttacgttttattaaatatacgaatacagatgaaatgctacttcatccatttctcagcccaattttggacctcatccataacactttctaacgcttttcccttgtcagttaagccatactcgattcgaactggtacttctggatagacattacgaactacaatgccctcgctttccaattccttcaaacgctctgacaacatacgatcgctcatatttgggataatatctgcgatttctctaaaacgtttcgactcttcaagcaaagatttaataattaagccagtccacttcttactaagcagagtaaaagctgactcaaactttggacataaacaagaattatgctccatatgtttcacctctcttccattataatatagtttcttgtaaaaagtaagttataaaactttcctcattattttattttacgtacattttaccatttccaaatattaacttgtcaactaaacgtaacatacccgtaaaaaaaccctcttaaaaagagagctttttatatctttattacttcgtataccatccaagacctaatgcaccttcacctaagtgcgtaccaattacagccccaaaataacctgtacgaattgtgacgtgaggatattttgcttctaattctttcttccattcattcgcttcctcttcacgttgcgcatgaatgataactgcttccataggtacacctttacttgcttgctcatcaaaaatttcaatgatacgttttaatgcttttttacgtgtacgaatcttttcaaacgcaataatgattttatctctaaaatataaaactggcttcacttgtaacagactaccgatgaaagcttgcgcgctatttaatcgaccaccacgttgtaaatgatgtaaatcatcaactacaaaataggcgtccatcgttttcttcatttcatcaaaacgagcgataatctcttttggattctttccttcacttgctaactttgcaccttcacgcacataaaatccttgtacttcacaactaatttcagagtcatacgtgtatacatcaataccttctaccatctgtccagctgtcgttgatgtttgatatgtaccactaattccacttgataggtgaatactaataactgcatcataatctttagctagttcttcatatagctcaacaaactttccgattgctggttgagaagtttttggaagttcctcttgttcacgtactttcacataaaaatcatctgctgaaatttcagcttcttcttgataagattctgttccaaacacaacgtttaatggaatcatatatatattgagttcatcacgaatttgcttcggtatatatgccgtactatcagtaacaatagctattttcattttcgtacctgccttataaaaagttttatttcctaattttacacgaaaactacaaatggtgcatccatacatgaaaatgccggttgaaattatacctaccatctcgacaaattacaacaaaaagataaaatactcaccaaaaacttcagcatatttagaaaaaatgtttgaatataaaaaggctcgcttttaaaatggaaagtactagtcattttgatagataggggcgtacacaattgctattacaatattttacaatcaaagactacggcgaacacgaaatcgtcattcaaaaatcaagatttatttgttatattagccgagcaacgactgaggaagaggctcaagaatttatacaaaaaataaaaaaacaacattggaatgcaacacataattgttccgcttatttaattggcgaacaagatcatattcaaaaagcaaatgatgacggcgagcctagcggtacagctggcgtaccaatgctagaggtacttaaaaaacgtggactaaaagataccgttgttgtcgtaacacgctattttggtggcattaaacttggcgcaggtggattaattcgtgcatatggaaagtgtacaagcgaaggcattaatcatgtcggtgttgttcagcgaaaactaatgcgtgtgatgcaaaccgagattgattacacattacttggcaaagtggaaaatgaattacgcaattcaaaatatgccattaaagatattcattatctagaaaatgtcacatttgatacgtatgtagaagaagacggcaaacaagcatttacagattggatgattgaattaacaaacgggaaatgtacaattacagaaggagatatgttgtacttagaacaagatgttatctaagaataacccatttatcaccttcaaagattaatgtagtgaattacttccctacaaatgaactaacgaactaaggagattatatatggaagaacgttattatcatctccaaaatagcagaataaaaaagaagcgaagaaggaaacttttcttcttccttattttcgcatttttatttggcagcataggagtttatgtgttaaattcttactcttctcttatggggatgtatagtggttttactcgtgaaaaatcggatttaagaaacgaagatgtagaaattacaaaggaaccttttacaattctcattatgggtatagaagattatgcgacagatggtcaaaatggtcgtacagactcattaatgtttgcaacagtcaatccgaaaactaaaaaggtttcacttatgagcattcctcgtgatagccgcgttccgattgttggaaagggaaaagaagacaaaattaatgccgctcatgcttacggtggagaggaaatggcaatcaaaactgtagaaggttttctaaaagttcctgtagaccattatattaaaattgatttccaaggttttaaaggtatcgttgatgctgttggcggtgttaccgttgacgtacccttcgatttttgggagcgctctgacgtggattactacaaaaaaattcaatttaagcaaggacagcaaaacttaaacggtgaagaagcacttgcttacgtccgtatgcgaaagcaagatccaaatggcgattatggtcgtgctgctagacaaagacaattactggccgctgttgcccaaaagctaaactccacctctactgtatttaaaattaaagatttaacgactgtagttggaaaatatataaaaaccgacattcctatttcagacggacttgctctttacaataaactctctggatttgatccttctacaatacaaacgttaaagcttgaaggcgaagacaaaaagataggcggtatttattacttccttccagatccaatcagtgtcgaaacggtgcgtaacgaaattgaaaaagaattaggagaaaaagcaaaaaacccaactacaaaaaacaattcaaatcctgattcaaattcaagttctaattctaacgaacaaacaaaaaaagcaacaaaccaaaataaaacaccaactgatccgccaccttctacaaatgctcatgcagagtggattatgcgcaatcagccgtaacaaaaaggcccaatctatgcgattgggccttttttatttacttattaaagtgctgtaaaattgcttctacaatacgctctgatgcacgaccatcaccgtaagggttagatgctttcgccatcttatcatgagcttctttatctgataacagctcatcagcaagaccaaagattgtctcttcgtctgttcctgctaatttcagcgtacctgcttcaataccttcagggcgctctgttgtatcacgaagaacaagaactggtacaccaagtgatggagcttcttcttgtacaccaccagaatccgttaacattaagtatgaacgagctgcaacattgtggaaatcaattacatctagcggctcaattaaatgaatacggttatgttcacctaaaatttcatttgctatttcacgaacaacagggttcatatgaacagggtacacaacttgtacatcttcatgtttgtcaacaagacgcttaattgcacggaacatattacgcatcggttcacctaagttttcacggcggtgagctgtcataagtacaagacgatcatttccaagtttctctagtacaggatgactatatgtttcttttacagtcgtttgtagtgcgtcaatcgctgtatttcctgtaatgaaaatacgtgactcatctttattttccttctgtaagttcgttgctgattttgctgtcggtgagaaatgaagatccgccattacacctgttaattgacgattcatctcttctgggtatggagaatacttatcccatgtacgaaggcccgcctcaacatgacctactggaatttgattataaaaagcagctaaacttgcaataaatgttgttgttgtatcaccatgtacaagtacaatatccggcttcgcttctttcattactttatccaaaccttctaaaccacgcgttgtaacatcaattaaagtttggcggtctttcataatatttaaatcgaaatctggcgtaattccaaagatacttaatacttgatctaacatttggcgatgttgtgctgttacagtcacaatcgattcaattttttctgggtgtttttgcaactctaatacaagaggtgccattttaattgcttctggacgtgtcccgaaaattgtcattacttttaaacgttcagtcatgtgattgcctcttttctttcactaattacagcttctattatgacatataaaaatatgcatgagtacatccctttttaacgcataacagaaacttttctattacaaatactttttcttcccaccgagtaataatctatcttttgtttcttaacatcttcatcagtataacaatttctcccatcaaataaaataggctccctcataagttgtacgtacttttctaacggatacgtttgaatatctccccattctgttacgataaaaaccgcactcgcatctctaatcgattcatctatacatctactatattgtatagcatctccaaatatattctttacatattgaattgcttttgggtcataaagaacaatatctgcacctatattaattaatgcttctattataataagagatgatgcctctctaatatcatccgtattcggtttaaaggatgcgccaagaactgcaatccgctttttattcatgttcataacttttttcgctttttcaatcaatagcagctgttgcttattatttacttcaataactgcttttaacaaacgaaaatcatgagcaacatttcccgcaatttgtaccagtgctttcgtatctttcggaaaacacgaccctccgtagccaatgcccgcatttaaaaaagatgcaccgattctcttatccattcccatccctttggcaacatccaatacattcgcgcctaccttctcacatatatttgaaatttcattaatgaaactaatctttgtagctaaaaaggcattcgacgcgtatttaatcatctccgcacttttaatatctgtaacatacgtttctaaacataattcactatacaaactctctactcttcttgctacttcctcactatccgctccaattacaatacgatctccatgaaagaaatcataaatacctgaaccttcacgcaaaaactctggattcgatacgatatgtactgtatgcctcccttttaacttctcctcaatccatcccttcattacatcatttgtacctactggaactgtacttttcgtaacaacaataatatcgttcgtcgcatataatccaatatcgttacaagcactctgaatatacgttaaatctgccgtcccatctaataaaggtggtgttccaactgcaataaatataaactctacatcatcaaatgcctcttctttatttgatgtaaaagttaaagcattattctcatatgcataatttattaattcatgtaatctggcctcataaataggtaaatccccttgttttatccgttcaattttttcatcatctatatcaaaacatgtaactgaatgccctaattttgccaatcctactcctgtaatcaatccaacatatccagtacctactatcgtaattttcatttccttttcgcacaggaatttacaatagaaaagatatgaaatatagaactcttcctgtgcttcctcctctcatattaaaaatgagaaaaaccttttccttcttcattatatgaattacttcccttattttttttaaagtttttgtaaaattaaatgcactataaagtaaaacttaatcagtgagaatccggctgccagttcacgcgtgataaattcccacattttaacacgaaacttactcatttctaggtgcaacacttataatactgaaataaaagtattcactattgaagaaaaagaggaaatgttacattccaaagcccagtacaattaaccttcttatatgattcaacattctatatacaattgtcatatattctatccgtttccattaaccgtaaaaagaaaaaaagattgaattctaatctttttgtgataccatatgttatgagcctgtaaataaacatcataattttcagataaatatattttcaaaaaaaaattacgttagactataaagggtggggtattaatggactcacaagtgatttatgccattttggcatcattcatcactgtactcgtcgttactcctttagttattaaattagcttttaaaataggagcgacagataagccaaacgcacgtaaagtgcaccaaaagattatgccacgtcttggcgggttggcaatatttattggtgtagctgtaggatttgttgtcggcggcttatatgaacaaagaatgttatcgataacgctaggtgcgattatcattgtaatcatcggaattttagatgatatgtacgagttatctgcgagagtaaaattcggtgggcaactgttagttgccatgatgattgtaaaaagtggattattagtgcaagtattatatatcccattccttggggatactgaacttggatggcttgcttatccaattacagtattttggcttgtaggtattacgaatgcaatcaacttaattgacggcttagatggattatctgctgggatttcatctatcgtacttgcaacgctagcatatatggccttcactagcccatggggtactggaacagctattatcttgccacttgcattaattatattagcaagtacaattggatttttattctacaacttccatccagcaaaaattttcatgggagatacaggagcactatttttaggatactgtatttctgttatatcgttacttggattatacaaaagtgtaacgttattcagttttatcgttccaattatcattttaggtgtacctatatttgatacgatatttgcaatcatccgtcgtatcgtaaataaaaaacctatttcagcaccagataaatcgcatttacatcaccgcttacttgcaatgggattctctcatcgcaaaacggtactaattatatacgcattcggtattttctttagtgtaaatgccattattttcactagtgcaacgttatggttatccattattcttcttttcgctttgattttcttcacagaaatcatcgctgaaataatcgggcttgtacatgaacgctacaaaccaatcatttccttttataaaaaagtgaaaaaacgcgaagactaattgtagtatagccttttcaattatgaaatattcaaatagcatcctctttcttataagaggatgctattttttattctcattttatatttccaaaatatagattgtttgagagttcctctattggagaaagctatacataataagaaaagtatcaagttttcttttttacatcttgattgtcaaactgagggtgaatgttatgatcaagcgagtatttcaatgtattattttatttttaacgattactatgtacgtatcatctaatactgaagcaacaactgttattcctgctgaatatcatccaaatactgaaacaacttctcctacacaaaaaattgcgtacttaacatttgatgacgggccaaacaaatatactacacaaattttaaacatcttaaaagaaaagaacggaaaagcaactttctttgttattggcggaaaagtgccacattacacaaaaacgatgcaacgattaattaaagaaggacattatatcgggctccacagcatgtcacatgatgtaaaacgcctttacactggtgacccttccactttaattgcagaaatggagcaaacacaaagcattgtccagcaagttacgaaattaaatacacatctcgttcgcgttccatatggtagtatgccttatttaaaaaagaattaccgtgacgcacttgtatcggcccagtataaaatgtgggattggacgatcgatacatacgactggaaaagctatgacaatccttctgccatactcgaaagagtacgtaatcaaagtgatgaacaagtcgaagtcattttaatgcatgattcgagtgtaaccgtacaaatactgccaaaagtaattgattacttacagtcacaaggatacaaacttcttccctataatccttcttctcatctcaaagtgaatttttggaaagacacaagattgtaacagctttagcgcctatgtgctaaagctgttttatttttctcttcccacccttcccatttttgtgtaaaattttaaatagtgatgaagtttcgaggtgaatagaaatgaaacgaatagatctcatttttaacgcaatacaaaaaggcaattatacagaaggtgtaaccgcatcagaactcgctacatttctgcaactagatcgcgccaatgtaagtagcgatttaaacaaacttgtaaaagataaacgtttattaaaaacaaatacgcgacctgttcgtttttacatagaaacgaacacttcgttggaaacgcattcaaaagacataacttcattagatacatttgcaattgaaaatacgagccttaaaattgcaattgaaaaagcgaaagcttctattctctatcctccaaacggtatgcatactttactactgggagaaacaggggtcggaaagtctatgtttgcttctttaatgcacgaatatgcaattgaagttgaacagcttccaaaagatgcaccatttatcgtatttaactgtgctgattatgcaaataatccacagttactactcgggcaattatttgggattaaaaaaggagcttatacaggagcaagtgatcaaaaagggttaattgaaaaagcacatgaaggaattcttttcttagatgaagtacatcgcctgcctccagagggacaagaaatgcttttcacctttattgaccgcggagtataccgccgccttggagaaacagagaacgaacgtaaagcacaagtattaatcattactgcaacaacagaagaaccaaattcatttttattaaaaacatttacaagacgtataccaatgactgttacgctgccaccacttcgtgagcgtacacataaagagcgctttgctttactacagcgatttttcacaaatgaagcaattcgtctgcgaaaagacattcacgttagcccaaatgcaatgcgtgctttcgtcttttacaattgtcccaataacattggtcaattaaaaacagatgttcaaattgcctgtgcgaaagcctattctgatttggtcacaaagaaacgtgattctgtctatgtttcaagttcagatttaccttggtatatgaaagaagggttgttcattgaaaggaagagccgtcacttataccaaataccaaatgaaacatttgtatttacaggtgaggaaggttggagtaatcataaaacagaagatgaaaaacgctcttctatttacgattatattgattataaatacgaagaacttcaagcacgtggtattgaagaggaagaattagaattactaatagaaaatgatgttcaaagctttttcgtacaatattttaaccaaatatcaaaaaaaacaagccatgaaaatgtttttaaaattgtggatcgtaatatcgtttccgtatgtgaaaaaatagcggaacttgctgaaaagcatttatctaagacgtttgatgaaaaagtatttctcgctttaagtttacatgtacagacaactctacaacgtttacaaagcggcaaacaaatacatcacccacaattaaatcaaattcgtacgaaatataaagaagctttttccgtagctatgcaatgcattcaactactggaggaagaattacaaataacaatgcctattgatgaagctggctttttaacaatgttcttcgttgttgatccaattcctgcctcacaaacagaagtaaaagtattaatattagcacacggtaatggcatcgcaactgaaatggcaaacgtcgcaaacgaacttctcggcattgaggaagtaaccggtattgatatgccgttacacgaatcaccgaaagatttcttggaacgtgtgaaagtgtatatgaaaacactacaaaatgtaaatgggcttctcttacttgtcgatatggggtcacttgcttatatcggtgacatattagaaacggagttcaaaatccctgtacgtgttctctcgatgacgagcacaccacacgcactagaagcagctcgaaaagctcagctcggttattcattagatgcgctgtatgaaacagtaaaaaatttaacaccattttacttaaacgtacaagaagaaaagaaaaaacctctctctccaatgaaatctgttattttaacagcttgcttaactggtgaaggaagtgctttagctattcaaaaaatgttagagaactatttacgatttgataaagacttaattgaaattattccaattagtatcgtccatgaaaaagatttaacgaaaatgattgagaacataaaaaaagagcgtaacatcatttgtattgtcacgaatttcgatgtgcaagtaccatgcttaacatatcatttccaagacatcgtaaactacacagcgattcagccaattcaagaattaattacgtatgaagaaacatatgcaaaaatggcggatattcttgaacaacaaatgcagcgtaacgatggagcattacttatcaaaacaattcgttacgcattaaatacaattcaggaattaatttccttacagctaactcctgatagcttaatgggtgttattctgcatatgagctgtatggttgaccgtcttcaaaaaggagaaagccttcttcctcaccctgataaagagaaaagaagacaagatgagtactggatgtatatgaaagtaaaaaaagcgttgcaaccaattgaaaacacatttgaaatacaaatacctgatgacgaagtattttatgttatggacttctttattaaaaatcagcctgtgaaaaattaatcgaggccgtttttaaaaatatcgatcgtaacgtgagttatatcagcgattttcaaaatatatcggcgcaacccagattatatcagcgattttcaaaatatatcggcgtaactcagattatatcagcgattttcaaaatatatcggcgtaactcagattatatcagcgattttcaaaatatatcggcgtaactcagattatatcagcgattttcaaaatatatcggcgtaactcagattatatcagcgattttcaaaatatatcggcgtaactcagattatatcagcgattttcaaaatatatcgatttaccgacaataattgctaaaactagcaccttatataatgagaaaaggctgttccaacatatggacagcctttgcctctatttctttacttttctaactcgccctcttatttctcctcttttttgtgatttcgtatggacattaacatatacatttgcttgaataatttcttgaagtaaatgtacgaatgatttcccttgtaaaggtccctcaaaatcctctacattcactacaccagtaatacttccctcgttcaagctaatcccttgctccagtggaccatacaaatataaaacaacaggaccaatttgagtagacttccctaaatgaatttgacaagatgtaaccttttctatattttttagtattactctgtaatgcaatttcgttaaatcatcactaaaaataaactctgctaccccaaaagcttctgtatttacaggaggcacttccctcttacctgttaacctggcaaagaaatgtgttgtcataaggcattctccttatataaatttcccagcactacttctactactttatggtttaaacataatcatttatgactttttcaattttaattacaaagaaaagattcacaaaatctttacattgtgattgttcctgtagattgaaagtctcttgtataatgcacatagaaaaacattataggaggttccattgaaaactaacaaatacacttttcatacattattagagatttttctcgtctcatttaaattaggacttacttcattcggcggtcctgtcgctcatctcggctatttccaccacgaatacgtgcaaaaaagaaaatggatggatgaacgaagctatggagatttagtagcactatgtcaattccttcccggtcctgccagcagtcaagtcggtatgggggttggattattacggggcggtctattaggagctattatttcatggattggattcactttaccgtctgtgcttgttttggttttcttcgcctcattccttaatcagttcgatcttggaagtgctggctggattcatggactaaaacttgtagcagtcgctattgtcgctcatgccatatggggaatggcgcgaaagttaactccagatcgaaatcgtgcaacgattgcgattgtaactgccgcaatcgccttattatggccaagtagttggacacaagtcatccttattataatatgtggctttatcggttggtttttatatcgcaaccaaccaattagccaatctcaaaatataagagtacctatttcaaaaaagatagcagtttcttgcctcgtcttattctttggactattactactgctaccaatattaagaccgttctcttattacatcgctttatttgacagtttctatcgctctggcgcacttgtatttggaggaggacacgtcgtgctgccccttcttgaaggtgagttcgtacaaaacggaatgatgacgaaagaacagttcctagctggatacggattaacacaagcagtaccaggaccactatttacattcgcctcttatataggagcagtgttaaacgggacgcttggggcaataatcgcaacaattgcgattttcctccctgctttcttactcgttattggtgttttaccattttggaacaatgtgagaaaaatatcattcatacaaggcgcactacttggtgttaacgccgcagttgttggtattttaattgccgctttttacgatcccatttggacgagtacaattataaatgcttcagatttcgttttcgcttcgcttcttttttgcttactagctttttggaaagcaccgccttgggttatcgttatacttggagcttttggcggatatattctatccattttgtaaataaaaaacgacggcatgatgtagccgtcgtttttctattaaaacttcacaagttctatcccttcaggcaactcactctctgttaaaatacgcaattccttcacacgatccattacgtaagaagaacgcttcacaagctctggatcaatataagctggatgaaccataatttctaccgtttgttcaccttgtactctttcttttaacttcataaagtaatcttccgtcacaccatccgcataaaagtcactgtaaaatacatcagaaaatggatgcaccgctctatcttccccacaacgacgaattggaacattatatttagctgctaatctctcaagaacatcgtgtaagatcggtaatccgtgtacatgatgatgactatctaaatgagttggtgttaatccgtaagataggaatttctcaatttgagcagtccactctctctcaacttcttctggatttatattcccttcccttacaacactttgtttatgaaacgatccgtcgctacctacaagtgatggtacgtctccaagaagtggctcccctgctgttaatacgagatgtacgcctactccgagtaggttatactctttcgctaagcgtaccgcatgctctgttcctggcatattcatcatcatcgtcgttgaatttacaagtccatttatatgaccatcaataatgccgtaatttgtaccttctgtaagaccgaaatcatctgcatttacaattaacttaatcatcataatacctcctaatagaataaaaaaagcgggctaaatagcgccgcttttacttctctacctttttaaagaactgtggaagatactctttatgtgcttccaacatttcatctaaaatttgttttgcaactttatctgatggtacaagcggattgattgtcatagcaagcagcgccttatgataatcccctgtaacagcagcttcaattgttgtgcgctcgaatgatttaatttgttgtactaaaccgcgaactggtactggaagatctccaactgcaattggttttgggccttctttcgtaataatacagttcacttcaacagctgaatcatgtggtaagcttgcaattgttccgttgtttcgtgtattaacaggctggatatcacctttattattgtaaatagacgtaattaagctacatgctgcatcactataataagctccgccacgtttttctaattgtggtggtttaatatctaaattcgggtctttatataactcaaataaatcattttctaattgttttactacttctgcacgtgtacctttttcaacagaagcttctttttcttcttctaacatttcacgtgttttgtagtagtaacgatggtatggacatggaatcgcacgaagtcctcgaataaagtctggctcccagttaagcgctgcgatattttccatcgtaatttgtttttctggatctgtcacaagctctaacacacggtccattacacttacgccatctaagtatacatctagtccgtataccatatgatttaaacctgcgaaatcaacgtgaacacgactcgcatctacttcaagtaatcttgcaagacccatacgaattccgattggaacgttacatagaccaactactctttgaatatttgtataacgaagaactgcctctgttaccataccagctggatttgcaaagttaattaaccatgcattcggacagagctcctccatatctttacaaatatctaaaataacaggaatcgttctcaacgctttaaataaaccaccaggaccatttgtttcctgaccgattacatcatattttaatgggattgcttcatcttttgcacgtgcttctaataaaccaacgcgaagttgtgttgttacgaagtctgcatcttttaatgcctcacggcgatcaagcgttaaatgtacctcgattggtaaacctgattttttcaccatacgtttcgctaagttaccaactatttccaacttttcttttcctgcctcaatatctactaaccaaatttcacgaacaggaagctcatcataacgcttaataaatccttcaattaactctggtgtataactagatccaccgccgattgtagcaattttaattccagtcatgctttattcccctttcgcttcaagctttttataaagatcgataaactctgctgctaattctttcactgtaatcgcattcattaaatgatcttgtgcgtgaattaaaagaacactaacctctgttttttctcctcttgcttctgattgtatgagctctgtttggaaatgatgcgcttcattaatcgcttctttcgcctttaccatcgcttcatctgcttctaccattttcccctgtttggcaaattgaagtgcctccatcgcaaagcttcgtgcgttaccactatttaaaatcaattggaatggaatttgttctgctgtagtcatcataattaccgccctctctataaggttcaaccgatttaaataccccttcagtttgaacatgtctattaaattattattttatgaatgatagtttggtgttcttgtagatgagtatcatctttttgaacatgatataaaggtaattattctgacgagctataggaactcgccagaataatattttttaaagtgatactgaattgtcgcttccttttgtttcagcttttgcagcctgtacataagtacggtcacacattaatacgaatggatagtaaattactaccgcaatagcaaagttcaccacttgtagtgctgcaccagcgatgcttccgcccgatacaagataaccactaaagattggtggcattgtccatggaactaacgcaactgtttttggtacccatcctaaagtgattgctgtataagaagtaataactaatacaactggtgtaagtacgaacgggataattaacgttgggtttaatacaattggcgtaccgaaaataactggttcgttaatattaaagaaaccaggaccgatagatacacggcctacaccgcgaagctgcgcacttttcgctacaagcattactgccactaagaatgctaacgttgcacccgatcccccgatatatacgtatacatcaaagaatggttttgtgaagatatgcggtacgtcatatgcagacataccatcattaaataatttcatatttttctctaatgctggtaaatagattgggtcaataatccccccaataatatttggaccatgtaatccgaagaaccataatacgtgaataagtagagcaataataattgcacttggtaatgtacccgctaaaccttgtaatggtaattgaattgtttcaaataccattttatgaatgcttgttcccgcaagtttcacagctaattgaatacctgctgttacaatcaaaataacgaatgctggaactaacgctgcgaatgatttcattactgccggtggaacaccatctggcattttaattgtaatatccctttgaacaaagaatctaaacacttctgttacaagaagagccactataatggaaacgaatagaccttgtgcccctgtccacgctaaatcaataccgccttcttttggcgttgtcggagaaataataattaatgcaccgaatgtaatgattgctgctgacaacgcatcgacgccgtaagatttcgctaaattgtaacttatcccaactgcgactatgagggcgagtatagcaaaggaaccagtccacataccgccaccgacatctttccaagcgtcaccaaatgtgcccttcataaagttttggaaagcatcaattggtaagttatttataagtactgcaaatgatccaactaaaataagaggcataactgcgataaatccgtcacggattgcaactaagtggcgctgcgatccaattctacctgcgactggaactaaatatttctccataaatgcaataaacttttgcatttcgcttcccccctaattattttttaagtgttaatgcgtgatctaaaactgcttctccattcatcatgccgtagtgcattggattgataacgtcgattccaacatttttctcgtcagcaagcgttttcattgaagagagcatgtaacgaacttgtggtcctagtaataacacatctgcttgatcgatattcgtttttactgcatccccagatacagcccaaatcttgccttctagaccgcgagcttttgcagccgcttccatttttgtaactagtaaacttgtagacatccctgctgaacaacataataaaatattcatttgaaaatcccccttgtgtagtataaaaaatttatgtttatttatttttctttacgctatttattaatgcaattagcgtgccaactttttaaaaccactaaaatcagtgctttttcgagcattttctttgtgtgttaacgctttcaattagtgtgtcgtccaaaaaatacacagtgtgttataaaacaacacgcttttaacacataactgtatgaaaatagattagtgtttagtcgtctagttgtgtttaatatgaaaaaacactaaaaaaactttttcaatgaaaaataattcattattttaacccactatttagtgaaataaaaaaaccttgcataagcaaggttcattcatccaccgacatcttcctatataactctacaaactcactcgctaattctttcaccgtaattgcattcattaaatggtcttgcgcgtgtaccattaaaagagtaacttcggtcttttcgccaccagcctctttctggataagctccgtttgtacgcggtgcgcctcctttaattcctctagtgcttcttgtaatttagcttcagcttctgtaaactccccacgcttcgcacaatcaattgcttccattgaacaacttctcgcgtttcccccatgcaagattaaatgaaaagctttcgtctctatcgtatccattgtagttctttactcccccttttcttccgccagtttttgtttatcccatatttttaagaacggtaaataaatgaagaatgctagcgcaaagttaacaagttgcaaaataacacctgaaattttcccgcccgatcctaaatatccactaaaaagaataggtgtcgtccaaggtacagcggccccactcggacgtgcaacccatccccattccattgcaaagtaagaaacaattgttagcacgactggaactaatataaatggaattagtaaaagtgggttcatcacaatcggcataccaaaagttaccatctcattaatattaaatataccaggtgcaattgacaatctccctaaactttttaattgttgacttcgtgcaaatagtaacattccgacaactagagcaagcgttgcaccagaaccgcccatataaatccataagtcaaaaaactgtgccgtaatcgtatttggtacatcttgcccagcttgaaaagcaactcggttttgatccattaacgacaaccaaacggggctcattacaccaccaacaatagtagcaccatgaattccacaagaccaaagaacatgaacgagaataactgctattatcgcgccccaaagactagcaccaagtacactaagcggttcctgtaaaatttgtcctacaatattatggatactgccaaaagaagtattttctataattaagcgtaaaatccaaataactgttacaacaataaatcctggaacaagtgctgcaaatgaacgcgtgacagctggtggaactgtctctggcatctttataattatctttttttgtacaataaaccgataaagttcagtagatataagtgcaataatcattgctacaaataacccttggcttcccattaatgcagctgggatagcgccttctacaagtacactttcttttgtacttggtataatatatgcaacttgaaatggagtcgcaagtaaaaacgtcacaagcgacaatgccccggatgctaaagcatctactttataatactctccaagtctgtaagcgattccaaaaacagctattaaagccattatattaaaagttgcactaactggataccctaaagctcgctgccaattctccccaaacaaacctgccataaaatcgttatatcccggtatcggcagtgcactaataatgaggaaaaacgatccaataattaagaaaggcatcgttaaaataattccatctcgaattgcttgtaaatgcctctgctctgcaaccttccctgctaccggcatcacatacttctctaaaaaccgtatcatctatcccactctcctcatggtttcattaacaaagctgcttgcaagatagcttctccattacaaagtccgtaatgaacagattgaatgacatcaacaggtatccctttatccttacatagttctttcattttcggtaataaataacgtacttgcggtccaagtaaaaggacatcagctttatcaatatgactattcacttcagaacctgatactgcccagattgttacttctatccctcttgcctctgctgctttctccatctttgtaacaatcaaactggaagacattcccgctgcacagcaaagtaaaatatttatcccgcttccctccccctttttctctacctaagttatggtgcatcccttgccaccactaggttacaaatatatatgtctagatttcctgctgtatgccgagcttaaaaacaaaaatttcttcgttttcacgctattccatttatccgtattctcctagtaaagaggacgctaactcgctataataattcagtatgatttttttaattgataggaggatatatttatgaaggcatatcgctttccacttattttgttatcttctatcctaattggtggtttcattggttatttcatgggtgccgatgcagttgctttaaagccgcttggtgacattttcttaaacttaatgtttacgattgttgtacctctagtgttctttagcatcgcatcgtctattgctaatatggatggattaaaacgtttcggtaaaattatgtctagtatggctgggactttcttatttacaagtattttagctgctatttttatgattattgtcgtgaaagtattcccgccagcacaaggtgttgtactagaactaacacaacctgacaaagccggcaaagctgttagtgttgcagatcaaatcgtcggtattttaacagtatctgacttctcgaagttactatctcgtgaaaatatgttagctcttattttcttctctatcttaatggggattgcaacttcagcagttggcgaaaaaggaaagccatttgctacattcctacaagctggtgcagagatttcaatgaaggttgtatctttcattatgtactacgctccaatcggacttgctgcttacttcgcagcattagttggcgaattcggaccacaacttcttggaacttacttccgagcagcaatggtatactatcctgcttctctcatttatttctttgtattcttcacattctatgcataccttgcaggtcgcaaacaaggtgtacaagtattttggaagaacatggtctctcctacagttacatcacttgcaacttgtagtagtgccgcaagtattccagcaaacttagaagcaacaaagaaaatgggtatttcttcagacgttcgtgaaacagttgtccttcttggttctactcttcataaagatggctctgttttaggcggcgtattaaaaattgctttcttattcggtattttcaacatggaattcgaaggaccgaaaacattagcaatcgcacttgttgtttctctattagtaggaacagtaatgggcgctattccaggcggcggtatgattggtgaaatgttaatcgtttctttatatggcttcccgccagaagcattgccaattatcgcagcaatcagtacaatcattgatcctcctgcaacgatgttaaacgtaacagcagataacgcttgtgccgtaatgacagctcgccttgtagaaggtaagaactggatcaaaaacaaatttgcttaataaatagaaagaggatgctcgttttgagcatcctctttctttgttgttaatccattccgccacaaatttgttaaaaccttcacaaatattccacacctcttatccattctccgtactataatcatgtatggaaaaggagatggacacaatgacacaaagcgcaccagaatttaaagttttgcaaagcattgcatttctcgctgtcgttttgcaaagttctttattatatacaatgaatcaaggaaatgtcttacttgagcaatccctcattatgggcatgctatttaatcttgcaaaattctcagcaccagcattcatatttatcgttggatttcacttaattcgtcactatacaaagcaattagtatataaagaatatatttccgaaaaagcgatacacttactcattccttatttcttttggtctattctttacttattaacaacaaataatcttattacgttacaaagtggaataaaaagtttattactcggaacagccgctccccatctttggtacgttattatgatgttccaaattcacttattgttccctttactatgcacacttttttattggtttcaaaaacgaacagaaaataaaaaagacatatataaatatatgacctttttcgcttgcctatattttctattaatgtggttctcttctcactatatttttaatggagaaaaattaacaagttcaacaattttacattatacagatcgatcatttctattctactcattctatttcgttatgggcggcattgccgctgtagcactaaaaacttggcgtctattcgtcatgaaacatatcccgcttataacaatattatttttcatcttatttttattcatcaattatgagttgtttagtttttacggagcaaactctattcatttaactgtttctacctatttaaaaccatctatgtttttatatatcgtatgcgaaattatcatactgtatgtgttatctattatgatagtacagcgtcgtggtttcttatataaaacgttacgtttcattggtaattacacgtatggtgcttatttagctcatttattcttcttgcaactatgcacaaaacttctttccttattcacactgcaagaaaatactatattatatgccctattactatttgtgttaacggccattatctctatttcaacaatggtcatttgtagcacaataccatttcatacttggattacagggccttctcctacaacaaagatgaaatggacgaaggttgtattacgaaaaaatcataaaaaactattcaagccatatatttgatataataatacgcatataaaaagaaagcgagagacacctatgattaatcaagttggacaaattatgctatatgtaaataaccaagacgaaacagtacaattttggacagaaaaagtagggttccaaatcattgcggaagaaaataacggaaacggattccgctggattgaaattgcaccggcgaaagaagcaggaacaagcatcgtccttcacgataaagcgttaatcgcgaagatgcaacctgaactaaacctaaatacgccttcacttatgttcttctcaaatgacttagaccgtctatataaagatctttctgagaaaaatgtcacagttggacaggttgtagatttacctactggtagagcattcaactttgctgataatgaaaataattactttgcagtaatggaacgcaaataaaaaataagctatccgaaaaaatcggatagcttatttcattttaagaaacttgttctgcattcgtttctctatgctgtatatgactcgtgatccaagcaattccaccggcaacaacgagataacataacaatattaaaatttgcatttgtaattgcgaccaatctcctaaagaaataacatcttgtaatcctctaagagaatgagacattgggagaaactgtccaattttgctaagaacagctatgtttaattctcctgggaaagtacctccgctcgtcgctaattgcaggacaagaagcgttaccgctaagaactttccaacaagaccaaatactgttactagcataagaataaatgtcataaacgtaaaggaaataacaatacttgataaaacaaagagtggcacacttgcgacttctaatttcataacacctagcacaactacatctacgagtagcgcttgaatgagtccaattaaatataccaatcctagtttattaataaaatgtaccgttccgcttaccttcatgttttgtctgcggccaagaggtaaaatattcgatgccataattccgccaacataaaatgcaagtgataagaaatatggtgcaatgcctgaaccgtagttaggaacgtcagaaactgttgacttcactaactgaactggctctgagaacatcgtattgcgtgcatcatcattacgaacatccgctatcttctctgcgccctctcctaatttcgtagaaagttctttcgcaccatcatcaagtttaacaagtccatttgttaatttactagcaccgttattcagctccgttccaccactcgcaagctgatttacaccttcttgcagggatgtaaatccatttccccacttcataaatccatcagccaaattcgatgcaccatctgctatctttttcgttccagcagtagcttcatttaacttaaatccgaatgtattcatgccttcttcaatcttatgttgaccatcagttagcttcttcgcaccttgtgtcaattgttgttggctattatttaaagtacttgttgctttagctagtccattagacgtagcaacaattttttgaaaagcgggatcttgctgcacttctggatgatttttcacgtactcttctaattgttgtttcacactattggccgccccatccgcttttacttgcccttcagcaagcttctcacttccgctcacccattcatttgtaccagcacttaattcactaactcctgattgtaacgttttttcaccttgtgctaataactccataccactatgaagtgatgtcgctccttgactcagctcatttgctccccccgttaaggcagattggctagacgcaagcttgtcacttccttctttcaatttcgatgtcccgtcacttaaacgatcaataccattcgcaagctgattcgctccattttttgcatcggtcgttccttcatgtaacttctcagcaccattacttgcatcactcaacccttgtgccaaatcttgaaactttgaaaaaacaccttctgtatatgatttcgtaatactgtttgagatttttgttttcatattttcaacagctgtcgttccaatttgagccgctacaaagtttttacctggatttactttgtactgcaactttgctggctctggtttctcatccataagtgtacttacctttttagagaaatcttccggaatcgtaacaaccatataatatttatcttcttttaacccttcatccgcacttttttctgatacgaaatgaaaagccaattccttattctcttttaaatttttaacaaaatcgtctcctgcatgaattgttttttcatccatcgcagcacccttatctaaattcacaaccgcaacaggtaatttatctaattttccgtacggatcccaatatccagctaaaaagaatcctgaataaattaacggaacgattaataaaaaaattaaagcgatacgtccatgtttatggtgccacatcgctttccaatctttaaatataagtttaattcccttcatgaaacatactcctcttctaatttaacacccttcgaatggtttaacagatttactatacacgtcactttacatactgtataatacatctttaattattaattcattccttttggtctatagaaaggagactcgaaatggaactgctccagttaaaatactttcagacagttgcacgactagaacacatgacaaaggcagctgaagaattgcatatcgcgcaaccttcactcagcaaaacaattgctagactcgaaaaggatttaggagtccctttatttgatcgccaaggccgacagattactttaaattctttcggaaaagtatttttaaaacgagtagaacgtatttttcatgaattaagtgaaggagaacgagaaattaaagatttagccgaattacaacaaagctctattacactggccgtttctattccaagaatattaccagaactacttggctcttttttactagaacatcctaacgttcgattccaacaatttcttgcatccactccttctatgaaacgacaactagataatatagaaattgacttttgtatctcctctgtgccaattgaaggtgaggagattgtttgggaaccacttattacagaagaaattttcttagtcgtcccttcaggccatcgtttatcaggccgaaaaaatatccacctgcatgaagtaaaaaacgaaccgtttattagtatgaacactggctatggatttcgacacttaacggatgaattttgcaaagaagctggtttcactccgcatattgcttttgaagtagatgaaccgaccgtgattagcgacctcattaagcaaggtctcggcatcgcttttgttccaagtttaactttattaaaaaactctactttagcatcaagcaagttgcgtattattgaacccaattgtcagcgaaccatcggattaagttggtcaaaaaaacgctacttatcaaaaacagctcagcaattccgtgaattcgtgattgattacttctccaacattaggacgtaaaattatatcaacaaataaaagttgccaccctcatatggtggcaacttttattgttcactcttttttaattccatttcagctaaaagtggtagtacattatcaaaaatatgcgtattattattttcacctgttacatatccaccataatatctactaaatacgttatcatttcggaatgtggccatatgatcatacaattctttcgcaaactttttatcacctgtttgtagtacgtacaaaatcgttaatccgtatgcggctggcgattcataattcacagtttgttttcccgtttctaaattgtaacgaccgtatagctttccatcctcctggaatttcttctttataaattccaaataagcagttgatgaaagaccacctaaacttcgatgatatgcaacgtatgattggtcaataagattcacttctttatcgtacgtaaatgtaccatcttctttatactctttcgggaatgcccagccatgccttggatagtccgctaaaaattgaacgacttcctgatattgctgagcagaaactttgtcgtacttcttcatataggagaatgcacgtggatttatgtatgatgttgttacaaaattattttgtttccctgcatctgcatcataataatcaacataataattatcttttttattataacgaagtacagcatcacttaattgatcggcaaggtttttataacgctcttccttatacatttcataagcacgatataattgttctataatacgaagatcatctataagtgcatttgtagctgactgcctctctcccttttcagagagtttccataaaacgatatgattcttatatacgaaattatcttgaataacctttacttgctcatcaaataacgcctgatcatctttatcaagtgtatattgtaaccataatcccgctgattctgataaagcttcacgtccctttgcttcacccgtacctgccttagtatctactaaacggtacgtggcaagcgttccattgtcattcaccatatgtcttaaaataaaattttctgtacggtttccttgtaaagctgaccaaaatacaattccacctaaagcgatcaagaagataattccaatccctatatataaacgtttccgcaatcttttcacctccctagtaaggctaaccttaattttatcagaacatacataaatttaaaaagacaatccactagattgtctcccccatttctatccctcgtaaacctctttagaaggtttatatagcgattgtacaagccgatcatattcacgacgtgtaatctctttattatatagcttcaataataaatctctatgctcttttgaaaatgccatctttttaatgacttcaggatacataaaacaccctctccatttcacataaacttcttcttttcgaaaaaacagaacttatgttcgcataaaagattataaaagattcctgtaaaaaaaacaaacaaaacatgagaaactatttatttctttctattcaaaatattacaacattatattatcatattcactttttaaatacatatatatttttggtagtttttttgaataaatcttccaattcaatcagaaaataatggcaaaaaagaagaggagtttacatatggatacggtaacattagcaagagcattttttggttcttcattagcattccacattatttttgcaacacttggcgtcggactttcattgatgatttttataagcgaaatactctatcactggaagaaagactccgactatgccattatggcgaaaagatggacaaaggcgtttgctattcttctcggtgtagcaattccaactggaacaattgttggtgtgcaaatctcacttctttggcctggtttcgccaaaattgttgggcaagttatttctgttcccttccaaattgagattttcgccttctttttggaggctttattcatgtcgatttacgtatatgcagctgataaacttcctccatttatgagattaatctcgctatttttcgtcatgcttggtgccacggcatccgccgtgcttattacatcagcaaatacatggatgaatacaccagcaggcttttcaatgaatccagatggatctgtttttaacgttgatccgtggaaagctttctttaatccaagttttggcacaagtgcatttcatgtcgttattacggcttatgcaaccggtgcagctgtcattgcttctattgctggatttaaattattgaagaaaaatttaagtacacgtgaaattgcttatcataaaaaagggctgctattagggcttgtcgttacatttattacaggcgctacgatgtggctttcaggacatgaatcagcgattgccttacataaacactcacctgaaaaacttgcatctgctgaagctttatttgaaacgacatcacacgcaccgctatccattggcggagttgtggatcctaatacacttgaactaaactatgcacttgaaattccaaacatgcttagcttattagtgggactagaccctagcactgtcgtaaaaggactaaacgaattcccacaagaaacatggccaccattttatacacatacactattcaacttaatggtaggaactgctgcgtttacctttgctgttgcaacaattgcactcttatattggtatttcgtgtaccgaaaaaagggaacagaactaccgaagtggctactttggggggctgccgcatgcggaccaattatgatgctcggtattgaattcggatggattttcagttgtagcggtcgtcaaccatggacaatttatggtatgcaacgtaccgtcgatgcatctacacgcgctgatttcgtcggtcctttatttgttttgttcatcattttgtatattggactcgctattttaacagtcattgttctacggacattctttagaagacatccattaaagaatgatttacaacaccaaggaggcgattctcatgtatgaggaaagtattgcaatcatcatcttatgggcccttattttcgtatacagtatactagggtccattgattttggcgctggtttttggggcatggtatacgcaaaacatccgacgctcgctgctaaacttgcgaatcggtacttatcaccaacttgggaagtaacaaatacgtttcttgttttcgtcgttgtcgcatttctcggcttctttccgaaagcggcctttactcttgcgacagtaatgttcgtaccagttatgttaattttagtgctcattgcagtacgtagtacatttatggtatttgcttactccttgccaaaataccaataccttcttcgggttatttcaggtattactggtctattaattccagcactattaattaccgttttacccgttacagagggagcctatattacaatgtctgaaggaaaggaagtactcctatatggaaaacttctttctagcccagttatctactgttatatgctcttcggactaacttctgaactatttctctcctctctctttcttgctgatttttcgagagaacaaagttcagaagatacgtatagaatttatagaagaaatgctatcatccttggtcctgcaacgctcgttacggcaattattgccctcgttgtaatggatccagaaacacattgggttatgcaaggattaataaagcaattcccgtggtttacagtttctattgttttattcgttatcggatactcgtccctttggtggacaaacaaaaagtacaatacactaggataccctcgcattgccgttttagctgtcgtcgctcaatatgcatttgcaagctatgcttacggggtcgcgcatttaccgtatattatttatcctgacgtaactgtatttacaagctttacaacgaaagaaacgttctatgcactgctcattctatacgcaattgggattgcaattttattaccaggatttattttcttctggaacttattcttgaaggatcgtacttttttgaaggaaaaataatatagcattggagtctgttccaaaaggcattttaggatagactccttttgtcgtgttttgtcgataagtcgatatattttaaaaatcgctgatatattttgagttgcgccgatatatttcaataatcgctgatatattttaacttgcgccgatatatctcaataatcgctgatatattttaacttgcgccaatacatctcaataatcgcccatataaatttcatttactatcttactgccccaataatttatagactcctctcataatagttatttcactattcgtgacacctgtcctttagcatgaaaaacacatattcggttcatctcgttatacgtctagttcttcttattttttgctgaatatactaccaatataaacttgagacaagctacatctgttcaagggaaaatagaaaggtaggcaaaatatgagcattgaaatatggattactattattgtatttttcttaacgatgatcgttatcttttggcgaccccgcggcttaaatgaggcttggccagcagcaatcggagctggtatcatcataattactggacttgtatcaaaaccagacatcatggatattataagtaaaattggcggtgcctccataacaatattagcaactattgttatggcagttatattagaaagcttcggcttcttccattggtccgcagcgaaactagcaaatttagcaaagggttctgggcgccgcttatactggtatattcaattattatgttttcttatgactcttttatttaataacgacggtagtattttaattacaactccaattttaattcttcttctaaaaaaccttcaattaaaaccacatcaacaaattccttatttattaagtggtgctttaatcgctacggcatctagtgcaccaattggtgtaagtaatatcgtaaatttaatcgcattaaacatcgtccatatgactctttatatgcatactgctatgatgtttgtacctgcaacattaggcttattatttatgtcatggctcatgtatacagttttgaagaaaaaacttccgaaaaaattacctgtttcttcatatgatattgaagaaattttcttcacgaaaaacttccatccactaaaaggaaataattctgttgatacgaaacaaaaacggacaagattcatgttaaaagtattaggtttcgtcttcctgatgcgctgtcttctattcgttgcatccttcttatccatcccaattgaaatcgttgcagtacttggttcactcgttcttctcatttggagatggtactacttacgaacaaatcctgtcgacattttgaaaaagacaccgtggcacattttaattttcgccttctctatgtacgtcattatttacggactccacaacgcaggattaacagctgtacttgtacaatggctcgagccaattgtgaatcagcatctactctatgctagctttgcgatgggcggacttgtatccatcctctctaacgtcttcaataaccatcctgcccttatgattggtacaatcacattaacagaaatgggactagatccagtcacattaaaaactatctatcttgcaaacatcattggtagtgacatcggttcactattactaccaattggtacgctagcttcactcatttggatgtatattctgaaacaaaacaaaattaaagtaaaatggaaagactatttaagtgtatcccttatcgttatcccgctcacaacagtcgtcacactatttctcttattctactgggtacatctcttctttgccttataaacaacagaagccccatttgctaccgtcttagcaaatggggcttcttctataataaagttaggtactacagtgtgatcaatcaagtaaagaggtgtaacatgttattgatataaatgactaccagcttctttaaattcttctgctttctctttcattcctttttcaattgcttctttcgtttctaaatcattttcttttgcatattcacgaatatcatgtgaaattctcatactacaaaacttcggtccacacattgaacagaagtgagctgtctttgccccttctgcaggcaacgtttcatcatgatattccatcgcacgttcaggatctaaagataaattaaattgatcgcgccaacggaattcgaagcgtgcttttgaaagtgcatcatcacgctgatgagccgttttatgtcctttcgcaagatcagccgcatgcgctgcaattttgtacgtaataacacccgtgcgtacatcatctttgtttggcaaacctaaatgttctttcggcgttacataacaaagcatcgctgttccaaaccagccaatcatagcagctccaattgcagatgtaatatggtcataacctggtgcaatatctgtcgttagcggcccaagtgtgtaaaacggcgcgccctgacaaatatcaagctctttctccatattctctttaattaagtgcatcggtacgtgtccaggtccttcaatcataacttgcacatcatgtttccaagcaattttggttaattcaccaagtgtttcaagctcagaaaactgtgcttcgtcatttgcatctgcaattgaacctgggcgtaatccatctccaagagagaacgaaacatcatactgcttcataatttcacaaatctcttcaaaatgagtgtataggaagttttctttatgatggaataaacaccactgtgccataatcgaaccaccgcgcgaaacgatacctgtcgtacgctttgcagtaattggaatgtaacgaagtaatacaccagcgtgaattgtaaagtaatctacgccttgctccgcctgctcaattaacgtatcacgatatacttcccacgttaaatcttctgcaattccgtttactttttccagcgcttgatagatcggtacagttccaactggtacaggcgcgttacgaataatccactcacgcgtcgtatgaatatttttacctgtagataaatccataatcgtatccgcaccccagcgcgttgcccatgtcatcttctctacttcttctgcaatcgaagaagatacagctgagtttccgatattcgcgtttaccttcacatgaaaattacgcccgatgatcatcggttcagcttctggatgattaatattcgctggtaaaatagcgcggccttctgcgatttccttacgaacaaactccggctctaccccttcacgaatcgcaacgtattccatctcagacgtaataatgccattacgtgcatagtgcatttgcgtaacatttgcaccttgctttgctctaagtggctggcgatccatttgcgggaaaacaggtgtatgtttcgaagctactctcacaccgtcatcctctggtttcacttcacgcccttcgtatgcttctacatcaccacgccccataatccaagagtggcgcggcgttggaattcctttttccaactcgaccttatacgcaggatctgtataaggaccgctcgtatcatacacacggattggtggatttggaacgccattcgtttcgctttgttcaatctcacgcatcggcactttcataccttctcgtggtccatccacatatactttcttactccctggtaaactcgacttcaattcaatttgctcagctgaaacagattgtttcataaattttgttgcccccctgttcgtgacaaggacaagatatggccagcgcatgccaaaataaaaagagccaggtccataaaaaaataaggacctggctcataaagacatcattatgtaaagccgttaacttccctacgctggtacgagccagatcaggtccaaagggttaagaagttcacgcgcttctctctcagcctacgcatacgttaggcacccctagtttatcactgatttaattttcaatactttcccatcatacacgataatctgaaaaatgaaaagtttatttcttttgctctttacggaatcatccacgttaaataatacgcctgcacatacgtcataataccaacaataattacgaagaataagctatgcttcactgtaaaacggaacaaatccgattcttttccagcaagaccaaccgccgcacaagcgatcgcaatcgactgcggggaaatcattttccctgttacaccgcctgttgtatttgctgcaacgagaagcacttcagatacgccgacttgctgcgctgtaatggcttgtaaatttgagaacagtgcattcgcagacgtatcagaccctgttaggaatacgccaatccagcctaagaatggtgagaagaacgggaatagtccaccagttccggctaatgctaacgctaacgtggaagatagaccagaatagtttgcgataaatgcaaaccctagtacgaatccgatagatagaattggcatttttaattcgcttaacgtttctttaaatgtcactactgcatcttttacattcattttcaaaataaacatggaaatgatacaagcaattaaaatcgctgttccagttgccgataatacatcaaacttcaaaattgcctcgtaaggcattggtttatttacaattggctctgctttcattactaaattatgcagacctggaatttcaaacttaaatacaagactttctaaagcccctcctgaagcaaatagtgccttaaagaaactttggctccaaatgactaccataaccgttaatacgataaatggagaccatgctttcactacttttccaaacgttaatttcggcatcgatgccgctgtcgttgttactgctacttcactatttgctcgcccggattgataaatttctttcggctgccaaacttttaagaacagcgctaaactaattaaacttacaagtgctgatgtaatatccggaagttctggccctaaaaatgtcgctgtaatgaactgcgtaatcgcaaatgaactacccgctacaagtaacgcaggccacgtttgtcgtatccctttaaatccatccattaaaaatacgataaagaatggaacaaataatgataggaacggtaattgatgcccagccatttgtccaattttatgtggatcaatacctgttacttgtccagcaactgtaatcggaattcccatcgctccgaacgccactggtgcagtatttgcaattaaacaaagacctgctgcgtataaaggatttaacccaagacccgcaagaagtgctgctgtaatcgctactggtgccccaaatcctgccgctccttctaaaaatgctccaaatgaaaatccaattaaaataacgagtagacgatgatcattcgtaatcgataataccgatgcacgaatcacatcgaattgacctgtttttacagaaattttatataaaaataccgacataatgataatccaagcaattggccataatccgtacaagaaaccatatccggtcgctgccattgccatcgtgaacggcattttataagcgaataacgctactaaaactgtaagtacaactgtaataaatcctgccacataccctttcatgcggaaaactgctaaagctaagaaaaaaaagataatcggaataagtgcgaccgctgccgaaatccaaatgtttccgaatggatcataaacttgtgtccatgtgttcattgttctctccgatacgataaacttaactaaatctatacaattcaatcaaatttacacgagttagtgcttcatcgtgttctcgcaaccccaaagggacgaggggtataacactccacacgaggcagtatcgttacctcctattatcaagcatttattttacccatcttgataaatttatcgcagcattcaaatctctatcgtgatggctattgcatgaaacacaacaccactcacgtatttttatactccattgtccttctggttgaactgaatggtcgtattttactccgcaacatgaacaaatcttgcttgaggcgaaccatttatcagctttttcatacgcaatgccgtacttctcgcacttgtatgacaaacattgaaagaagaagtttaatttttgaaaggaaagtgccttcgatagttttttgttttttaacaggtttgaaatagataagtcttccacaacaatcctcattggtttggttttcaccaatttagctgttgcttgatggatatggttatttcggatattcataattttcctagataaccgcaggtgctcagctttcgctttttcatatccggcagactgaattttcacaccttttttaaatctcctagacatatctctttgcgctgactttttccttttcaaaagttttttaaccttagcatctttgtttatatttcgttctttcataccattagaagctacaaaaagttcttttaaaccaacatccacaccaatcgactcattcgttagttcttgtgattcaaagtcttcttggaaccctacactaatccaccagtgacgaccatcaaaggtaactcgtggattggatggttttttatttcttggtagttgttggcttgttttcacttctccaatagactgaatatgaacgactttctttcctataaccagtctttcataattggcataaaatccttggattaaatcttttttggatttataagaagtgtgataaccatttttgtactttttgaacgaatgttttctcgccgtatcaaaatcttttgaagcctgtttgggaacttgtgcattaatgtcttttaaccactcatatctctttcgcttcttgatctttgtaaatcgtttctgtaaagctaactgtgaaacagattttccaaatagcttatagtatctatcactcattcttttacaatagttataagcaaatcttgcagcaccagcatggtttctaagcacttgttcttgctcaggcgttggaatcagtctgactttcttcgccaatatcatcagaatgtaactcctttaatgaaagatttgttcttctgaatcgtagcgtgttccaccagcattctcctgagactaccaggatacaaacctgttaattccgatacttgactaactcgtgaaaatttcattattattcttagctcattaaatccaatgtagcacatacgttctatggattcaatgaggtttgatagatttaattaaatttatctcgttcaactaagggcgcaattccttagccagttctcttatgaacttctcatattttcacatgagcgcagactatatgtttatctctttagagatagaggatttttccaccaccataggcttgtgatgtactctcgtcagttatacgagatagtcgttgaacgttcatcttatccattttgacttagatgattcgaggcggaagacccattgttctagtgtttaggatttaaccttgcacgatctgattgattttttctgctttcgcgacattcacgctcaccatttctggtcacgttgtagttcaatcagctttagggattgcccgcagttaaccctcactactagccaatcacttgactagcagggcttactgatatatttaattaactttggttataattggttaaataaatcgtaacagttagttacccccctaaagaatccccttttaaatagaataacctcaccaatagactatcaggtcatcatacctttaagcctaaaataaaaaaacgttcaagaaaacgttttcaacaactttcatttatactgtaccataacaatttctattaaaaaagatttttttgaaaattttattatttaacagaaaatcttacaaaatcgtcacgttcttgtaatgttcatcgataggaagtttgccaaaattattgcataataatagtataacaacagaaattattcatgaggtgatatatatgaacggaaataaaatattagctgcgttatcatactttagtgtactatttgcccctatcttattccctattatcgtttggattgtgggagacgctgaaacaaaaccacatgcaaaacgtgctctatggacacacatcattccaagtatcgctacattcattggcgtaactattctaggaattatgggccttggatctgatcaaccagacgtaacacttggaattggatcaatgattgtcttagctatttgcggaatcatcagcttatactacttcatctggaacattgtaaaaggcattaaagtgctgaaagcttaattttaaacaaatgtttgtttaaaaagggccccttgcaatttgcaaggggcccttttcctaattcgttcactttatcttctgcgtttcttcttttttctcatcattttctttcggcgcgtattcactttatccgctataatgtggagcgtacttgccacaacaattcccattaagaacgttacaatttcaacctcatgcttcttcgcaatttctattaaattaccatccagtgcgactacatttaatagtaataaaaatggagaaaaaacgattaacatgtacgcaatacgaatcacatcaccaagtataatcgtatgcgtaaagaaagatcgatgcggcattactttcttataaggataccaaaatatacgtaagaaaccccatttgttataagcattactgtacgtatctaaatctggtgttaaaaatgaagtacctactaaaaaaccaattgcaaaagttaataaaaaatcaaaatttgttaatccatacgaaaagagcaaaaacaaaacaaccggaagggatattaagtttattttcgtatgcgttcttcctgatggcataatgcacttcctcgcttacgttcgtcctgtcaccttatgacagatttcacctattgacctaatttctgatcgataaatgttgtgtctatatccgaactaaaccattctgccaacttcactcgtgccttatctttcacatcttcattgacgtataacgacacctgtattagtgcggccgttaacgcccctaaatcatccgtatagccaattccagcaatgaaatctggaatcgcatcaatcggtgcaataaaataagcaagtgctccaattacaataattttcactcgttttggaacatcgggtctttgcaaaacgtaaaacagtaataaacttgcataaatgaccgattgccctgcttgctttgcaacatgttttactttcttccaaaacgcttcaactgaaaatttttgtttcatgtaaaaagcctccctatttttaaaaagaaataagctacaatatgttatcagtaaaagtttatggaaattacacaaaacctatcaatgaacttttattgtaacaaacaaaccaaaaaagaacaagtgttcgttaatttttacactatttccttcatataatagatttctagataacccttacccatcttcatttcttatttctcaacaaagaaaattttcacttccacttaacattctgctctacctttgttatattttctagttgacggacatataaacgaatgttaaagttttctctggtagtgacaaatcttatacaaaaaatgtaaaatgttatagtgtttctcagaaatgaattttgttgtataatacagaaatgacgttatgcttatgagcaacaaaagaaaccaaaagggtatgcatagttatagtcgtatatgggtgaatatagaacctttaattatggccaagaaaactatgtattttttattttagcatttttcgctccaaaatcgaccaagcctgatagagaaagggtggaaatgaatgaaagaaaccttgaaatcacaatttcaaaatgtgcgttttactgtattcgtagctttagccttatggctgaaaacttaccttattacacgcacaagctttgacttaaaacttgaatctttcatgcaagaattcattttattccttagcccattagcagcatcattactgcttgttggtcttgcattatttgcaaaagggaaaaaacgtaactatatagcacttggaattaattttgtcttaacaatcgttcttgttggtaacgtaatgttctacggattctacaatgacttcgttacattaccggtgctaggacaaacatctaacttcggaagtttaggttctagtgtgaaagaattatttaactacaaaattattcttgcatttgcagacattatcattttcttcgttctattaaagaaaatgaaaaactttgcacctacagagcgtgtagcacgcccgatgcgttccctatacttcgtatcaacagttgctattttcttcgcaaacttaggacttgcagaagctgaacgcccagaactattaacacgttcattcgaccgcgttatgcttgttaaaaacttaggattatatgtacaccaagtatacgatcttggcttacaagcaaaatcaagttcacaaaaagcattcgctgacggtagtaaattacaagaaacagaaaactatgtgaaaacaacacaaagtaaaccagatccaaatatgttcggtactgcaaaagggaaaaacgtaattgttgtctctcttgagtcgttacaaacattcttaattggcgcaacagttaacggacaagaagttacaccattcttaaaccaatttacgaaagaaagttattactttgataacttcttccatcaaactgggcaaggtaaaacatctgatgctgaattcctagtagatacttctttatatccactagaccgcggtgctgtattcttcacacacggtaacaatgaatatacagcaactccagaaattttacgtcagcaaggatactacactgcagtattccatgcaaacaacgcaacattctggaaccgtaacattatgtatccggcacttggttatgatcgttactacaacgagcttgactacaagattacaccggaaacaaaactaaactggggattaaaagatatcgagtacttcgatcaatctgttgatatgttaaaacaagtgaagcaaccattctatactcgcttccttactttaacgaatcattacccattcacttacgatgataatacgaaattaatcgacgaatacaattctggtgatggcgtatttgaccgttacatggtaactgctcgttacttagacgaagcaatgaaacactttattgagcgtctaaaagcagaaggtatttacgacaactcagtaatcgtattctacggtgaccactacggtatttctgaaaaccataaccgtgcaatggcacagttcttaggaaaagaagaaatcactgcatttgaccatatgaacttacaaaaaacaccgatgtttattcacgttccaggtcaaaaagaaggtaaaacaatttcaaaaccaactggtgaaattgacattaaaccaactattctaaacttacttggtgtagattctacaaatgacgttcgattcggtcatgatgtattctcacctgataataaaggattcgttgttcttcgtgacggtagcttcgttacagataaatacatgtacacaaacagtacattctatgaccgtgctactggcgaagttgtacaattaccgaaagaagaatcccagccactaattgatcgtgcccaaaatgaattgaacatgtctgataaaatcattgaaggtgacttacttcgcttctctgaaagtaataagatcaaaactggtgaagtaaaaacagttattaaagaagaaaagaagagcgctgagtaatctcagcctctttttttattttcttccatacaactacttatattcattaactttaaaattacataacctttaccaaatattcacatagtgttaatgaagaatctctataataaaatatgtaaacgaggttctacatatttcttatctctcatctttcgtaagatcccttaaagaaatgtgtaaatcttttgtttctactttcttataattgtctttcaacttgttttgtttccatacacaaagcattcaacgagacaatgtccctatgaaagatagctaccctccttgtgcagcattccataagaatgttgcttttttttatttaaaagcaggattctcatttcttattttcgaatttgtatatacaaaatgctgtaaagtgaaactttaatcagccctcatcaatcgggcatttacgggcagtgattcgcccacttcacttctttgctctaccggaatttgtaagtaggggctttactgccgttaatgcggggtagatcatccttatttctctatgatttacaaatacatatatggtcatatgtagagaattgctcacataaaaattactatagtgatttttatctcgcatgaatgaaagtttcacgttacttacgtacttacgaaaggatgggacggaaattggcatacgaaaaatttgtactttggaatgatgaagttattgatacaacaaaacaacaaacgtacatagaacttgaagaaagaggttcgcagttcggagatggtgtctatgaggttattcgcctatataaagggaactttcatttattagatccgcacataacgagattatatcgatccatggaagaagtagaattatcgctccctttctcaaaagctgagctcatcactttactttacaaattaattgaacgaaaccatttccacgaagatggcaccatttatttgcaagtatctcgtggtgtacaagctcgcacacatgtattttcatatgacaaccctccgacaatttatgcctatattacaaaaaaagaacgaccggctttatggattgaatatggtatacgcgctatatcagaacccgatactcgatggctacgctgtgacattaaatcattaaatttattaccaaacgtactagctgctacgaaagctgaacggaaaggctgtaaagaggcacttctcgtaaggaacggtattgtaacggaaggaagccattccaacttctttttaattaaaaacggaacgctttacacacatccagccaatcaccttattttaaatggcattattcgtcaatatgtcctttctttagcgaatactcttcacattcctgtgcaggaagaacttttcagcgttcgtgacgtttatcaagcagatgaatgcttttttacaggcacaacgattgaaattttaccaatgacccaccttgatgggaccgcgattcaagatgggcaagttgggcctatcaccaaaaaactgcaaaaatcttttaatcaaatcttattacaatccaatatggcatcttcttaaacacgaataatttctgtcctttcatattcaatatatgcatttaaatggaaatcaaggtgtaattttatgccttgatttttttcttgtaatctttttgtcatattcagattcctatataagtcttgacagtaatcgacatgctctttagaatttttaacagttggtaaatatttcttcactacattacagacagaaaggaatcgacaaattatgaaaaagtatcttgccggtcttgcggcagtgtctgtagcaggaggagcagcacctacacttgatagtgttcaagctgcacctgaacaaaatacacaaaaagctgctacaactgtccaagcttctgcatcaaacagctcatcttataaggtaaacgcgagcgtattacatgttcgtgcgggatcaaacacttctcacgacatcatctcacgcgtttataacggtcaatcactaaacgtgattggcgaagaaaacggttggttcaaaattaacattaatggacaaacaggctttgttagtggcgaatttgtatcaaaaagtggcgcagcaaacaacaatgtaagtacaggtggaaacaataaagttaccgctgatgtattacgtgtacgtacagctcctaacacatctagttctgtttctgggcgtgtatatgaaggacaaacattaaacgtaattggacaagaaaatggttgggtgaaaattaaccataatggacaagtaggttatgtaagtggcgaattcgtatctggcgtttcttctaatgcaggttcttcaaacaacaatacgaataataacaaccaagaagtaaaaccagcaagcggaaactatacagtaaatgtatcttcccttcgcgttcgtacaggtcctagcacttctcacacaactgtaggttctgttacaaaaggacaagtagtacaagttgttggagaagttcaagattggttcaaaatcaattacgcaggacaaactgcttatataagcaaagactatgtaacaaaaggcggttctaacgaaaacgttacagaaggcaacaaacaagagcaaaacaataataatggaactattcaaactggcggttcttacgtagttaacgctacatctttacgtgttcgtacaggccctgccgcttaccatagtgtaattggtggcgttttaaacggcaccacattaaacgtagttggatctgaaaacggttggtttaaagtaaattaccaaggaaaaacaggctttgttagtagcgaatttgtaaaattcgttaaaggtggcactactactcctgagcaaccaaaacaacctgaacaacctaaccaaggtgcaattggcgattactacattaatgcttctgcactaaatgtacgtagcggcgaaggtacaaattatagaatcataggcgcacttccacaaggtcagaaggttcaagtaatctctgaaaactctggatggagcaaaattaactacaacgggcaaactggttatatcggaacacgttacctatctaaaacaccagttggaggcgcagtagataataagcctaacaataaccaaaataacaatcaaaacaataacaacaataataatacaggcaacaatagcggcgacagttcttccgtacttgcatatgcaaaatcaatgcaaggtgtaccgtacgtttggggcggaacttctgctaacggcgtagactgcagtggctacatctaccacgtatttaagaaatttggtcataacattagccgccaaagtgttgcaggatattggagtagcctaccacaaacttcaagtccacaacctggtgacttaatttatttccaaaacacttataaatctggtccttctcacatgggtatttaccttgggggcggatcatttatccaagctggagataaaggtgtagcaatcgcttcattaagtaactcttattggaagagccacttcttaggatacacgaaagcaccttaattaatagtttcaaagccttctagtttactagaaggcttttttgtacgatttcaacacattactccctttcccctagcttccctctataaaaataatgtatccattcttccatttcatacactttattctacaaaaacaatgcataacgttatcataatgtatatattttcataaaaaacataacctatttcatgtctatttattttatatgtgtttttttgaagaattttctttttatttaaacttttcattagacgtttgacctccgatgtccattatgataagttactaaagatgttatattcgcaaacgtatagacaactggtttatacactgtttttactatgaggaaggagcatacactgcatgaatcttttatggggaattggcggcgtgattggagtattagcaattgcttttctactatcttccaaccgcaaagctattaattggcgcacaattttaatcgcgctagcattacaaatgtcattttcatttatcgtattacgatgggacgctggtaaagcaggtttaaaacacgctgctgacggtgttcaaggattaattaatttttcttacgagggaattaagttcgttaccggggatttagtcaacgcaaagggaccttggggatttgtattctttattcaagcactacttccaatcgtatttattagttcattagtagcaatcttatattatttcggtattatgcagaaatttgttagcatcgttggtggtgcattaagtaaacttcttggaacttctaaagcagaaagcctaaactcagtaacgactgtatttttaggacaaactgaagctccaattttaattaaaccttacttagcacgcttaacaaatagtgaattcttcactattatggtaagcggtatgacagctgttgctggatccgttcttgtcggttatgcagcaatgggtattccgttagagcacttattagcagctgcaattatggcggctccatcgagcttattaattgcgaaactaatcatgccagagacagaaaaagtagataataacgttgaactttctacagaacgtgaagacgcaaatgttattgatgcagctgcacgcggcgcatctgaaggtatgcaacttgttattaacgtagcagcaatgttaatggctttcatcgcattaatcgctttattaaatgggctattaggattagttgggtctttattccatattaaacttagccttgatttaatcttcggctacttactatcaccattcgcaatcttaatcggggtttctccaggtgaagctgtacaagcagcaagctttattggtcaaaaacttgcaatcaacgaattcgttgcatacgcaaacttaggaccacacatggcagatttctctgacaagacaaatctaattttaacattcgcaatctgtggattcgcaaacttctcttctatcgcaattcaattaggtgtaacaggaacgctagctcctactcgccgtaaacaaattgcacaattagggattaaagcagttatcgctggtacattagcgaacttcttaaatgcagcagttgcaggtatgatgttcctataaacttatataaagtcttctctttctacaagaggagacttttttcatgcaatccaaacgtcttttatgcatctattaatcactttatcccaaatataagaacattatgatacaataatctttaagtctttttatttttccgatgaaaatagagatactacttgttgttgcccttcaaaagagtgtaacgacatggtcaatttcttaataattgcgcatactacaagtatctattgatgaaatagctttaaggaggaaagttttgtgaaagataaattctataaaatcctctctatgtggattttacaaattgtattttattttactactgtacatgtgacgaaatatgagcatgcgctcatttttacaataatatacgtaatcgtaaatgtactattcttatttttagctgacaaaacagcatttgttttcttcatactaggaaccattatttccgtattttatttgttctatcaagcatggcttcacttatggagtacatcagatcaatggcaatatatgattatccacttcctgatggcagctaacttcttcattgtatatataacaactcacctattgaaaaaagtgattcatgaaaataaaactttaactgagcgtgtgagaacattagaacaatatattggagaatcaaaattactaacaagacaagaattcgagagacgccaagcgttattaacgactgcaatgaatcgtcgtaatgaaacaggcgttatcatttactttgatttcacttcctttagtaaatatacgaaggaaagtgttatgaaccgtgtagcttctttattagttgaaacagtaaggaatgattttgaccttgctgctaaatatgataataatacgctagttattttattacaaaacacaaatgaagctggtgctgacattgtaatgaaccgcctaaagccaaaaatggagcaatggcttgctgctgaagcaatccgagatataaaaatttcacgcgagcaaattggaaacaaaggacaaaccctgttatgatgactctcgttatacttcttttattccttctgttttgcgtactcgttttttggattagtatcacattttcaattaaatatgtacttatttttacggcttttctattctctggcttactcgtttactactctttattaacaatcgcgggcctaattcaccgaaatagtaaacgaaaagatcgtacgctagaacattatccgagcgtcgatattttcatacctgcccataatgaaggtgtcgttattaaagatactttagaggcgatggcgaagattgaatatccaggaaagctaactatttatttattaaatgataactctcaagatgaaacacctgaaatcggcgatgatttcgacaaagcttatgctcatattcgccacattcgtgttcctcccggtgaaccgaagggtaaatcacgtgtattaaactacgggcttagtatttcagatggtgaatacttctgtgtttacgatgcagataaccagcctgaaccacacgcactgcgaatgcttgtagagcacgctgaaacaactgaagatgctgttggagctgttggacacgttcgtacagtaaacgaaaaaagaaactggttgacgcgaatgatttcgctagaatttcaaatcttccagctccttatgcaatctggacgctggttactattccaaacaggctcactgacaggaacaaatatgcttcttcgtcgctccgcactagaagagcttggtggctatgacccttatgcaattgcagaagatgctgaattaacattacgaattacacaaaaaggttatctcttaccaatcgtcccagaatcagttacttgggaacaagaaccagagcatttaaaaattcttattaaacagcgtacacgttggctccaagggaatttatatattttagaaaaaatgttctcatcactaagtttctttaaaggaaagctgcttgttcattccttacaacaagttctagtgtatgttgtattttggctattcctaatcatttcgaacgtttggtttgtaattgggctgctcgggatattccaaattcaatatagcattccgctactatttatgtggtatgtcgcatatattacatatgtttctcaattatttagtgcccagagtgtcgaacgaacctttacaccgactaatatttttattagcgttattatgtactttacgtacgcacagctctttacgtacttatttattcgtagcttaatcttatacttacgtgcaaagagcaagaaacaagtcattggctgggataaaacagttcgattcaaaaaagataaataataaaaataagcacagagcgccgtatgctctgtgcttatttattgccgtataaattatatatcagacaataccccttagctgaaagtaatttcacgtccatcccccaacgaacgatcgaccttcatttatatacgaaaaagtgattgctatttttgtagaaccaattgcttctcttgctgttctttgcgcgtttcagtcttaggttccgtgctttcttggacactacgatgtgccacacgtttcaaacaaatatgcttccactttctttcgtaacgtttcattattctagatgtcccccttgaatgcgctttaaaactatttgaaatcgcttacaggaaataatatagcacatatatataaacgtgacaacacatttccgacaattttttgtcaaaaatatgaatagaattcgtaagggatcgaatattgtcgaaacctatcgttttttcttcgtataaaaggcatactacttatgtggtaaagtattttatttcccctacccgcattttaaattccttctatataaagtgaaactttcattagccatcaccaatggggcttttacaagcagctcgatttatttgcttttgctgaattttgaggtggggttcttactgctcagcaaatagagggataaaaaaagagctgatatgaaatcagctcttttccttctattattaatgacgcttcatacgtccttctttttgtaactctttaaataatgctgccatcataaagaaaataacaaagacgaacgggaacgctgcaataatagctgccgtttgtaatgcttctaatccgccaatatataatagcgtagaagctatcgcggctagaacgataccccaaatcattttaatacgatttggtgggtttaaactaccatgtgtcgttaacatccctaaaacgaatgttgcagagtctgcagatgtaataaagaatgttgcaataagtaaaatacctaaaactgataaagctgatccaaagctgcccatctgatcgaacatagcgaataatcctacttctgttcccatctctttcactttttcgaagatatgtgcatcaccaaacagctccatatgaatacctgttccgccgaaaacagagaaccaaagtgcaccaattacggtcggcacaagtaacacaccgattacaaattcacgaattgtacgacctcgtgaaacacgagcaataaacgtacctacgaatggtgaccatgcaatccaccatgcccaatagaaaattgtccacgattgaatccattggttcccaccttcgtctaatggacttaaacggaagctcatgcttggtaattcctgaatataagaaccgattgttgaagtgaagtaattcataataaagtttgttggacccgcaaataatacaataatcataagtgcaaacgcaaaaataatgttcgtattacttaaatatttaattcccttatccagacctgtttgcgcagataacataaataatactgttacgattgcaataataactaactgtgtcgttaatgaatttgggatagatgttaaatagctaacaccacctgcaatttgttttgcaccgagacctaatgacgttgcaacaccgaacacagttgcaaaaacagctaacacatcaaatgaatgagcaatacgcccgtgttccccgcccttaaataacggacctactgtcgcactaatcgtacttgcttttccttttctaaaggtaaagtaagcaatacataacgctacaaacgcatatagtccccaaggatgtaatccccaatggaaaaatgaaaaacgcagtgcaagacgcgcactttcctcagttgcaccttctccaaacggaggtgcgtataaatggtttaatggttcagcaacgccccagaaaactaagccgatacccataccagcactaaatagcatagcaaaccatgtcatataactataatcaggttcgtcatcatctttacctaaacgaatagaaccgtatttcgaaacaattaaaaagatagacacacctaaaataatagaaacggaaataatataaaaccagccgaacttactaactaatgcagtttgaattgcggttgttacatttcctaaactaccttttccaataatagattcgggaataatcccccaaattgtaaatgcaatacataatgttaatgaaacgatgaatgtttttgtcagtttcctcatcaaatcccccttcgtaggtttcgcttttgtaaataacataaattccgatatgtaaaatcggatagaaaactataattttgcggtgattttcttactttcaccttcaccaattcgaattcttatggacagccttacctttcgtataaccttttcactctgcaagagctacaagctagaaatactgctgtcaaattgtgtgagaaaaacgcggataggaatgtattttcctaaaaaaggatgtgttacatatgtaaaaaagggcaaatttcttccttgcaaccctttcgttttgtaacaattatgcggttttttttctagtatatagcacgtgtttatagcttcacaaacaaaatgtttatgtttatataactatattacccataaaacggtaaaatactcaaggaatgtaatcgtttagtaaacattatgtaacattactgtaatatttttatttacgtcgaaaaaaacatgttgtattaaatattttgaatataactagaaacctatgattcatatagaatgaaaaacgctttcttatattttttgttatattacaggatattaacgacttattacgaatggtttgtaattgtgtgttttccccaaatccgaaaaaatctgttgctataatgaggacacgaaaacaaacgcaatggaggctatcatgaaaaaattaattggtatagcaacagcagcagtttttggtcttgggattttcacatcatctgctaatgcagaaactgttgtaacaacagatgtactaaacgtacgcgaaaaccctactacggaatcaaaagttgtcggtaaattactaaacggtaataaaatagatgtacaaaatacagagaacggatggtcaaaagttactttagacggtaaagacgcattcgtaagtgcagagttcacaaaaagcatctactacgtaacagctaacgtattaaacgtacgtgctgaagcgaacacaaactcagaggttcttggaaagttgaagaaagacgatgtaatcgaaacaacgaaccaagtacaaaatgagtggttacaatttgaatataacgggaaaacagcttatgttcatgttcctttcttaacaggtacagcacctgtaattgagaaacaagaaacaacggctcctgctaaagctgaagcaccagctaaggctcaaacacctgtagcacaagcaaaaccagctgctaagcctgctgtgaaagctgctgaaactagcgaaccatctggtggtcgtgagttaacagttgtagctacagcatatacagctcacccgagcgaaaacggtggcacatatggcggccgtgtattaactgcaatgggtcatgatttaactgcgaatccaaacatgaaaatgatcgctgttgacccgaaagtaatcccattaggatctaaagtatgggtagaaggttacggagaagctatcgctggagatactggtggtgcaattaaaggtaaccgtatcgatatcttacttggatcagatagcgctgctcaaaaatggggacgcaaaactgttaaagtgaaaattttaaaataaccaataactgctaaattacaagccggttctctttattgagagctggcttgtatttatttataatacatataaggaggctatgcccatgaatgtacaagcaaaagtagactggattggtacgccaaaaccgtacatatataaagatgaagtgacatataacgctacttctattgatttttcactcgctggcgatgataaacgctataagttaattgtgctcaagtctgaaaacaatacacattacaaaattgtgcaatatggaataaaaccaggctctcaaaagccatttcctatcgacattccatttgaacaaaacatgttaccaattatagagcaaatattacatgatccatatgtacaagaaatattaaaggaaacacactcataattgtaaaaaaatatatcaacgatttttcaattatatctatcataacttacgatatatcaacggttggacacgaaatatcgatttagctacaaaaaagaagctgttcaaatattgaacagcttctctcatattaacgagttggaccagatacatcttctgatttcaacgtattatttgcaccaagagaatgatacaacatctttccatttccattcacagttacaatatgttcgctattaaaacttttgaacttcacagatccatcaccgtaacgaatatgatactcttcatatgtcgttactttatatttcgtatcactttgacgctctacattacgaacttccatcgttaataagtcttctgtaattccttttttgtgtaaatactgtatataatcacggtcttccttatacgatttcccactcttatcataattcttttcaattaaactaaaatcatttaatgaaattgcacgtacgttatcataaatatgatttcttacaaattcgcccactgctgaacttgatgtttctttcgggaattttaagtaatacgtgctttggtctccaattttaacactttcagatttcatcacaccaaaatcagtagttttctctaaatgtacttctactgtttcatctgtggatacagggccaagcttataacttccataatttaattttccacgttttttcccattcacaaatacagttgcatcactttcatcagaagaaatgcttacatacttaccttcaagcgataaatccactttcaccttctcgctctgttcatccgctaaatctacttctttctctgtttctaattcagtcagttctgtcttcgccgttgcctttacaacatatgtacctgggaagtatggccccaactctttcgaagttttatcactagaaagctctgtttcttttttgttattcacatgtatttctgcattttttgcagttgtactaatgctcatataataagatttcatgctgaacttatactttggatataagaaccactcttttccctcttctactatttccccgtccttaaatgaagatttatctttagttaacttttgatctactgtctctttctgtaaataagacagtaattgtttgttgtaagaaggattctcttttaaataacgcatgtacgctttaatatcctctgtcttaatctttaagcttgaatcattcgcttttacaaactcatcaattgcattaatatctttcttttggaatgcttcaatcattacatttacttgcttttcttttgaaaacttatatgctccaaatttatatgccccaaataataatgcagcaataacagcaaaaccaatgatcaaaaataaatttttcttacttttcactgattttgtctcgctttgtaattctgtatatgaagcagcagtgttatcaacgattacttctactttactcccacactcaggacaaaagttcaaatggtctgcaacattctttttacatgttccacaaaacttcaacgtgctctcctcctattttttagctaatttcattccagcaaatgccgctacatatgtcacaatcaagctaaacaaagttaaatatataaatgaattttgcatagataataccgttccacttgttccaaataaacctgttaccgttcctgaaacattaatttggaacttagaaatcatattcattacaatcatcataattgtgtaagaaccactacataccgctaatgtaatatatatattggcggtcggtaatttagctaactttcttcccgctctaaacataaagaacaatggaataataagcagtaataaaccataatggaatacattattcactttatcaaattctgcaaggctttcctcatttgctccttttgaaatcaatatctccctaagctctacgccatttacagagacgcctgatataaatgaaaacgatagcgtgctctcatatgtatttgatttcttaccaattctagtaaattctttactaagtgctggacttgatacttctaacggcgcaaaatgagccatactccataattgaggtgttaactctaatgctaataatgtactttcagattttaaaattgttatttcttttaatggttcaataccgtcttccttacttactaacgccataatacaaaccgctatcgctgttactaatagtccttttatcatagctgaaacaccgtaatacacagacgctccatatggcattaactcttgaaatgctactgccatattgtttttgcttgtatgagcaataaatcctaataaggtaaataatgtcccacatacaacaccactcaataaactcttaatcgctgaatagccaaccgtaatcttacctgcttctgagaatggaattgcaaaagattgtgatgctataaaacttataatgaataaaaagacgccataaataataccaactgttgctgccataaagatttgatctttaatcgttttcgcaacatgctgtttccctaaccaaattcctgtaccagcgaaaataataaatggaatgattaataataatgtaaatggagtatgccaagataaagaaaatatcaatccactatcatcgttagctgtaaaaccaagtaaatggtaacttaacatcgtagaagttgcactcgaataaaaacttggcaacatttctaattctttcgcaaatttgctaaacatctcacttaacatagaagcaaataataaactaccaatccaaccagcaattaacatgagaatacttgcaacagccccaccaataaaacctttttgtaacacggctttatctgctttaaattcaactttaggagcaccatccattgtaggcaattttacagattgttcttttttcttcacaacagataaagaatacccgcacttttgacaatataaatttttttgagcattttcactgccacaacctttgcagtattttgcagtatctttttctaatgttactgcatctatagctcctgcaatctccatactaccttcatttgggcaataatttacttcttcaccatgttgttttccacatgtgcgacaatacatttaattcactccccactttgcttaattccacaaactggacagtaagtagagtttttatcgatatgctcattacatgaaatacaatttaccgtttcaccttcattttctaccgctaacatcgggttagattttccacacgaaccacaaaacttatcatttattgataaaggtccaccacattcacatgtagctttttcaccttgttgtttttgcaattcaacaatgcgctttcttgcttgataaatagctacatcaaattcttgaactggagcaatcatttcttttaagctcgcttcatttactccacttcctcttaattgaacatacacttgctgcccaacctctaatagaacctctgcttttttctgcatttgcacttgcattccctttttcaattgagcaatttcttgtgcaacttgcaacttcattttcccttgttctattccttcttgtaacttattcattccactacctaacttcgtctgtaaatctgacaaattacttctcctcctatacgtatatattcatatatgaaattaacattttatatattaccatgattttcaagttatgtaatccaaatttcattttttctgttttgagcattttttgtttataatggtaaaggaaagaaatatgtgtacggaggaatattatgctgcaacactcaattacgaaagatgaaattatgatgattgcgaatgagttcgttcaaggactagatccacagcaaacagctgatcaggaacatgtcgctacagctcggcacctatatcgtagtggtgttgtctacaacgttgactttgatggttatacactgtcaggaactgtagatgcggaaggcaacgtatatagcgttcatattccgattcgtaatgtcgctgaaagttattgtgattgcttcgcaccaacacaatgtgagcatatgctcgctgtattactatctgcagcgtctagtttcgggcaagtaggagatgtattaactttatttaaaaataatacgaaaccttcccttcctcctattagaactgcaagacaagtattgcaatcatcagcttttgaagaaacggattataaaagttgggaatcatattttgaaaaagaatatgaatcatttaaaaaagaacaagctcgccttacttataaacaaatgtattttcttatgagtatctttacagatttctatacgaagcttgagcggaaagctccgcgcgtcatcgccatacatgaattattcaggttacatgcagcaatttactgctttcaaaaattattagaagaaattcaggcattcgaagcaaacaaaacgtattcttatcaccaacctgttaatgtcattcgcctatttgtagataaagtggaatccatcgttcgggacttacaatcagaagcgattccttcagagtctgaaataattttgcaagaaacaactcgtctcgttcatgaagtattcttctctaccgacgcttatacgcaagagcgatttttcatttatcgtcacatatggagtgaacttttaaacaataaagagaacatacaagaggaagaaaaacgaatcgatacgaaaatcaatccactatccaaagcattagcgtcttctcatcttctctttttaaatgatgaagatttactagcgatggacttactaaagaaacaacctgcttctgttgtgagtctatacttctattggttagaagaactattaagtgccatgcaatgggatcgtgcaaaaaactggctttcctttacgtataaacaagtaaagaaaacgatccaagatcacgaaaatacgattttcataaaagatatcgttcggctatttgtaatcatgtatgaaacatacgcaacacatacaaatgaacaagctggttttgaaatgattttacaagaactattaccgtatagtttcacaaactacgaacagtacgtactcgcgaaaaaacagtatcgcacatgggcagagcttcatctcttatatggatttgaggcaatcgaactgttgaaagagccactgaaagatattgaaaaagaagcgccagaagtggcacttcctctttaccatcttgctgctgtagaggcgattgaagaacgaaatcgtaaatcatataaacgtgcagttcgttacttaaagaaattacgtacattatataaacgattaaaacgcaccgatgaatgggatgctttcattattcacatcgccaatctccattcacgtctgcgtgcactacaagaggaattacggaaaggaaaattaatcgatgatcaatcaaactgaagtaacaattaggctccagcatgttagtcaaggttggttcctttggggagaagatgacagcggtactccattatccgtaacaagttggaaacgaaatgcattcacatggcactccacttctttctacggtacgtttctaaaagaagcaaccttcgaaggaaaacaaggtgtgctgctaacaaatgcacaagcctttgaatacattgcaaacaaaccgatgaattcctttgcacatattcaaataaacggcatgattacagcacttacgaaagatgcaaatgaactatgggatgcctttacgagtggtagtttcgtaccagatatgaatcattggcctaaacaaccatcttggaaagttcaaaatacaccaattgaagatgacacattagcatcgcttttctcagcagcagtaaatgaaagcatattacaagacaaccgctcaaatgacggctgggaagatgctaaaagactatatgaacattatgactttacgaaaagacaactggaaacagcactacatgaagaagattggcttcggaaaattggttatattgaagatgatcttccgtttacaatcggactaagactacaagaaccacaagaagaatttgaaatgtggaagcttgaaacaattgtgacaccaaagcgcggggcgcatcgcatatatgtatatgaaaacatcgattccttaccgaaaagatggcacgattacgaagaacggattacagaaacacaagaaggttttagtaaactcataccgtggttaaaagaaggagatacgttccgaaatgaactctttgaaacagaagcgtggaacttcttaacagaagcaagcgacgagttacttgcagccggtattacaattttactaccatcatggtggcaaaatttaaaagcaacaaaaccgaaattacgtgtccagctgaagcaaaatacagcacaaacacaatcgttcttcggtatgaatacgctcgttaattttgattggcgcatttcgacgaacggcattgatttatcagaaagcgaatttttcgaactcgttgaacaaaataaacgtctatttaatataaatggtcaatggatgcgactagatccagcctttatcgaagaagtaaggaaactcatgaaccgtgccgataaatacggactagagatgaaagatgtcctgcagcaacatttatcaaatacggctgaaacagaaattgtagaagatgatagtccgtttactgatattgaaatcgaactagatggatattatgaggaactattccaaaagctgcttcatattggagatattccaaaagtagatgtccctacttcactaaacgcaacacttcgcccgtatcaacaacacggcattgaatggttattatatttacgaaaacttggatttggagcattgctagctgacgatatgggactcgggaaaagtattcaaacaatctcttacttactatatataaaagaaaacaatctcaaaacaggccctgcattaatcgtagcgccgacatctgttcttggaaattggcaaaaagaatttgagcgtttcgcaccgaatttacgtgttcaattacattacggaagtaatagagataagggcaattcttttgaagatttccttcaatcagcagatgttgtattaacatcttatgcattagctcaactcgatgaggaagaactaacttcattatgctgggatgctgttattttggatgaagcacaaaatattaagaacccacatacgaaacagtcgaaagcagtacgaaacttgcaagcaaatcacaaaatcgctttaactggtacaccgatggaaaatcgccttgctgaactttggtccattttcgactttattaatcatggatatctcggaagcttagggcaattccaacgccgcttcgtcacaccaattgaaaaggatcgtgatgaaggaaaaatccagcaagttcaacggtttatctcaccatttttactgcgccgaacgaagaaagatcaaacagtcgcattaaatttaccagataaacaagaacaaaaagcttactgtcctcttactggtgaacaagcttccttatatgaacaacttgttcaagatacactgcaaaatgtcgaaggattaagtggcattgaaagacgcggctttatattacttatgctgaacaagctaaaacaaatttgtaatcatccagctctttatttaaaagaagaagagccacaaaatgtcgttgaacgctctatgaaaacaaaaacgttaatggagctcatagaaaatataaaagatcaaaatgaaagttgcctcatcttcactcaatatatcggcatggggaacatgctaaaacgcgtgctagaagaaaaattcggccagcgtgtcctcttcttaaacggtagtgtaccgaaaaaagatcgcgacaagatgattgaggagttccaaaacggaacgtatgacattttcatcttatccttaaaagctggcggaacaggattaaacttaactgctgccaaccatgtcattcactacgatcgttggtggaatccagctgtggaaaatcaagcaacagaccgcgcatatcgcattggtcaaaaacgatttgttcatgttcacaaactcattacaacaggaacattagaagaaaaaattgatgaaatgctagaaagaaaacaatctctaaacaatgcagtcatcacaagcgatagttggatgactgaactatcaacagacgaactaaaagaattactcggtgtataaagtgaaactttaattaggccaatcacgtagagttttactacccgcaaaaaaagcgctaatctcgaaatgagattagcgcttttttctattccaaaaccaattacttattataatccccgttaacccgccgcacgtatcaagcaatgaatcttgccacattggtgtacggtctcccgtaaaccattggtgaatttcatcaaatgttgcataacccgcaacgaaaagaagggcatatataaaacatcttttcctcgaataacctgatcgatgaaaagcgtaataaatcaatgaacctagcataaagaacaccataaaatgagcacctttacgaaggaaaaactcaataaatccgcctacacctttattcgcaatactaacaggggttcctccaccataatcgatagatacccatgaaaaatgctctttcacaaattcaacatttacatattgttcaatatctgaacgcatatcctgctttttatatggttgtgccgaagaatagaaaatcagccccatccatagtaatacaggaatccaaaataaccatttacgattcattatccagaattctcctctcttcatcttttaagggtaccaaaaaaaagaaaaaatttcacgccaaaacatgacattcacgccctatttataaagtgaaagggggtgatacacatggcaattgaaacaatcgtaatggatttaactttacgtcttgtcttaaacaacggattagataagaacggcaaaacagttttcaagagcaaacaatttaaacgtgttaaaacaaatgcgagcttagatcaagtacacaacgtagctcatgctctagcttccttacaagcatcaccacttcactctgtacaacttgtaagcacatcagatctttctaaactataaagtaaaactcggatcagtggggattttattcatccccgctgattattagcccgcaatttaaccaacagacccaaatcccgtaaatagcgggataaatacaaaggagggaataacacatgcaagtactagagttgattttcgcgaaagaagatggaaaaacagtcgttttttctatcgatacgcccatcacaccaatcgatgcacaagtcgtaaatcaagtaatggatacaatccttgcctcatctgtattttcatccattgatgaaaatacaagaaaaaagggagctcgccttgtagaaaaaaatgtatctgaagttccaattactctataaaatgaaaaagacgaatctgcatcattttgcagattcgtcttttttcttcggcatttcaatcgggataaaaacctttgaaaaaccgacgcatacatacttataatgttcttcccctatatcaaactcagtcgtatatgttgagaagaatatataatcatttcgcttcgtataatgatcaattaataacccaacttgtggttcaacatactttttcgctaactttttaccggccgatgccaaatcgccaaggagaccctcttcattctctttttgaacttcatctagcttcttactcacatcattacgcttcataaactgtttcgctgcccattctgtatattcgcccttactcggattactgtttgctaaatatactaggagaacgacaactaaagccataataatatactttttcttcatactatatcaccgcctactcttttctattttcatatatatgtacaagcgatgcaacttagaaagactatcacctattgattgtaaacgaatagccaaaatttacaatatgaaatagaatattaacaactaatttacttaatttatatataattatattcagaatgtaaattataagggaggatatagaattatggataatgaaaacaacatttttatttctagttctacaatgatgcttgaaccatgtaaacacccttattaccgtacaaaaattattgacagtagcggaaaccatctttactcctgtcaaactgctctccaacttatacagaaatcttgtctaacaaatattcattctacttatcaagggagacgtaatgctgtaaaaacaaaatttaaatttaaacaaaacgttccaattccgatcaatcatagagaatatatttgtgctttcccaacagaatctcctgcttctccaaattgtatttggcttttcttcaaacatgttcatacaatagagtttttcaaaaaagctaaacgagctaaaattcatttttcaaacggagctaccgtaacgatacaaattagttcccataagctaagtcagcaattatggaaagcgggatatgtattatcccaaatgaacatgcaagattcatcaccttaataacaaatagaatggaaggtagtatttcctcaccttccattctatttgctatttttatccttttacactatcgcgcattttctcgattgcttgccgatacatccaccttacttgataatatgtcatttccgtctctaaagcgatttctcccatcgtcttccctacaaaaaaacgttcaaaaataatatacttctccttctcgtctaacacactcataaaatccttcactcttatttcaacatcttcaaaatgaaagatatcctcatactcacctacacatacacatctttcttgcaaagtagattctttcttcaatctttctaatatataaccacgcaccgttacaagtgcatatgcagggaaatatcccttctttgcatcaaatctttcatacgcatgccaaagaccaattaaaccacattgataatactcttcataatcttgacggatacctaatttctttatttgatttacaatcatcccttcatacaaaacaactgtctctataaaagtcgctggcttcacacagtacccgtttctaaaaggtatacctttctagtattccgcggtaccttcacaatataaaaataaacaaaagatttcaccgtgagtaatttcaaatactaccgacggaatttgaaattacaccagctagtatttgaaattttgttggtggtatttgaaataggggtaaaaataaaaaaggctccttctatacattagaaggaaccttttgtttatgagttctcaagttatactattctgtagttatatttttgaaaaatctatcgatcgcatatagaccagtagctaaaatataacttgtaacatgaacaaaaaatttgctataagtttcttaaatatatgtatcttctccttataacaaaaatgcagcaattacttttataattgctgcatttctttctagttacatgaaatatcaatattattgcaccaatcctcttagtgcaccaaagccgatcgttaaaatgaagaagataaccataagaatcgttgccttctttttacttaaaccggccgtaatttgaagacctaaccatgtgataacaaatccccaaattgtaaatacttcaatgctatttgcaataccttttacagcgcctccacttgaagcaaaaattgggcctaaaccagtgtaaagttcttttcctgaaccacctagaataagtgctaaaactatatttattaataaaccaagtactgaaataatgcttgaatatacattaattgttaataatttcttgtaagaagtatcattgctcattaacatcattaacactttatatacagcagcactaatgaagaaacctattatcataccgataacaccaaatacaaaaccagcaccgaaagtcattacaggtgtaacattaacccctaattcttgattgagcttaattgattcaggtgttaaagaatatacataagcaccaattccaccagtaatccccgatagtaaagaaagtatccaaaacgcaccccaaactgcattactattcttcattctctcaaactgctcacctggagaagtaatcattcctaataatgatggcttcttcgcacctacatcttgcgtattaatatttgcttccattataacgcctccttctatttatataacccgttctaacgggcggttcacttcctcatatagaggctacgaaccgcccactagaacggtaatgtgtagttctactacactattaattactcataacgcaatgcttcaattggatctaatttcgcagctttatttgctggaattaatccgaaaataataccgagtgtcatcgagaacagtacgcctccaacgacaacttcccacgaaacgagtggtggccattttgcgaatgtagaaacgatatatgctccgccatacccaagaccaattccgattaaaccacctagaagtgttaacataacagcttcaattaaaaactgtaataaaattttactacgcgttgctccaagtgctttacgtacaccaatttcacgtgtacgctccgttacagatacaagcatgatgttcataacaccaattccaccaacgactaatgaaataccagcgataccaccgatgatcattgtcataataccagtcatcttcgaaataccttcttgaatttcttttaaattcataacttcatatttaccagttgcatcggtcggtttacgactatttaaaacatctgcagcttttttacctgctttttctagattatctacattttttgcttgaacagaaatattttgaatttcatcttttccatacagtgtcggccataatgaaattggaactagtgcttctgatggtcccattcccataaactcattatctgatttgtagacaccgataatttgcatcggttgacctttcatttcaataattttaccgactggattggtatccttaaacaccttttcttccatttgtttactaatcatgacaacgttattaccctgatccacatctgattcttgtaaagaacgtccctttaacaactttactttatttactgcaaagtactcactatctaatccagtaatacttaccatttcttttttatcttcaatatcaagtggttccatgctggaatttgttgttaccacatgtgcgatctctggaatttttttaatttcaaaaatgtcttcttcagttatcttcggtgcttctaccattcccataccgaaaggatcgtttatatctgcactataatgaatcggaaccgtttgattacctgccccaacaaactgcgatttcaatgcagcttccccgccttgcccaattgcaacgacagtaataatcgaacctaccccaataataataccgagcatcgtaagagctgaacgcagtttatgagctaaaatagaagacagggcaatttttatactatctagtaaactcataccgcacaccttctatcttctgtaactttcccgtctcgcagtacaatgcggcgggaagaatacgctgctacttcctcttcatgcgtaaccataacaatcgtcgtaccttctgcattaagcttcgtgaaaatattcataacttgctcaccagacttcgtatcaagtgcaccagtcggttcatcggccataatgaacgttgggttattcgcaatcgctcttgcaatcgctacacgctgcttctgtccacctgataactcatttggtaaatgatgcacgcgatctgccaatccaactttacctagcgcttccaaagcacgcttgcgacgctccgctttcttcacgccaccatatacgagcggaagctcaacattttccactgcggaaagacgaggtagtaaattaaaatgctggaatacaaagccaatatattcattacgaattaaagcaagctttgactcgtctgctgttaagatattcacgtcattcagcatatattcgccttctgttggacgatctaaacaaccgataatattcataagcgtcgacttaccagaaccagacggccccataattgaaacgaactcaccgctctgaatcgttaaactaataccatgtaaaatcggcaccgccaattttccttgataatacgttttagcaatatgatttaacgtaatcatttctctttcacttccattccgtcatacacatcgtcggaaggatttttaaccaccttttgccccactgttacgccttctacaacctctgtccagtctccatcagtagaaccttttttcacattttgtttacgaagcttacctttttcctcaacataaacaaatgcatcatcgcctttttctacaatgctcttacttgggacagcaatcattttcttattctctaagtttacctgcaatgaaacgtggtagcctggagataaaccgtcttggctatcaagacttgctttatatgtatattgagacatattttgagttgcttcacccatgccgccagcttgcgccatctctgcacttgttgggaactcacttacctctgtaatcttacctgtccacttcttcttattatttgctttcgcagttacagtgaatgtttgatctttttgaatttgtgacttctgaagctcagttaacgtaccttgaacttggaatggatctttagaagctacttgtaaaaacgcttttccttgaccgcctagcgcttgagatgaactttgtgccgcatctttatctaacttttgaacaacaccagcaaaattgctataaatcgtaagttctttctgcttcttacttaactcttctttctgcaactttcctttttctttctcaaggtcaattgttttttgtcctatctctaactcgtttacttgctcgtccattggatctgttacttctttcccagctccgctatctttcgccttcttaatttctttcttcaatgaatcaatcttctttttcccttgatcgtaacgcatatccgccatcttctgatcaagctcagcttgcttcatttgaagattaatctcttcattgtcataagagaataacttcgtacctttttctacctcttgcccttcttttacctcaatatctttcacttttcctttggccggatctgcatagaaactttcaatattaccaggcttcacctgaccagaaattaacttcgtattattcagcttacgttctgtcactttctcaaaacttacagcatcagacgttgttgatgcacccttcttcttaccttgcataacaaaaatattaattgccgctacaataacaattagtgcaataaccccaataataatccatttcttcttcttgtttggagtacgaaccgtatttggtaacatattctctctcctttttataacttaatagtttaatataaaaattgtataaaactttctgaaaatagattacatattattacattgtttttacaaagttttacacatccatttatattgtaacaaaaattccaatgattagaaatatgacattatatcttttaagatagatttaaggaaagtttatattatatagaaaaagccatccaaaataataattggatagcttttcaaacaaaatattacgctactttaggatcttttctctcatgtccacgttgaacaataaataagaagattgttgataaaaccgctcctgttaatagtaagatgaaacaaccatcccagccagaactatcaacaataacaccaattgctgcgttagctacaagacttccgcctacgtaaccgaatagaccacacataccaactgtcgtacctactgcaaatttcggtactaattccatcgcacttaaaccgattaagaactgtggtacataaattaaacaaccgataatagaaactgcaatacttacaacaagtacgctagttgcttgccaatatataaacgtaccaataacaactccaaccatactaataatacataatggcatacgttttcctttaaataatttatcacttaaaaaaccaacgattaatgaacttggaattgccataccttcaaagattgcatatgccgcatgcgcttctgcttttgaaaatcctttaactgtcgttaaataaagtggaacccagttaataacaccgaaacgaattaaataaacaaaagcattcgcaatacataagaaccatacaaatttatttttcactacatacttcattaaaatttcttttggtgacatcttgttagcattatctgctttttcaagattttcatagtcattacgatactcatcaattggaggaagaccttcagattctggtgtatccttcgcattgatccaaacaagtactgcaattaccattgcgataatcgcagggaaaataaacacgccgccttgccaatgattttcaccgaaaatacctacaccaattccgacaagtggtggtacaagcattccaccaacgttatgtgaaatattccaaaggcctgttttcgtaccacgttctttcttcgagaaccatttcgtcataacaatactacaaggtggtgctcccataccttgtacaataccgttaacaacaagtaatgtaacaatcatcccaaaggatgatgcaaagccgaaacaaatatttacaagccctgataagaataaaccgactgcaataaagcgctgggcgaaagctttatctgataaattacccataaagaacttactaaatccataaacaattgccattactgagcctagtagaccaatttcagctgtactaaaaccatattcttgtactaaatacgtacttgataacgtaaagttactacgaactaaataataagcagcatatccaactgaaattccgattaacacacgaatacgtagtaatcgatatacacggtcgatcatatccgctggcaatctttcaattgcaggtgctggcttgagccatttaaacatatattttcgtctccttttctcacttcagagagagacgctgtctattccatatctcgattattccgctatttgatatattttggttcgtccttctaaccggctgtccttctatttctttctcattcttcgcaaacatcgttggtacgccaaacgacactttttctaaaatatgccccgcttcttctgataaacaataatcaataaataaatccgcaataataccactcggtgcacgttttagtttcgaaatcgcattaacggataaccctgtttgctcaggttcgttacttaaaatcggaaagccttgtttttgaagcattctctgatctcccataaagttgatgcctatcatatattcaccgctcgcaacaagttctgctgggatgtaaccattcactgttacttctccaacttgttctgccagattcttcacatatcccttcgcttcctcttcacctaacgtatcaatcagtgattggaaaaacgtatatgctgtacctgaaacatttggatcgggcatgacaatctttcctttatatactggattcaataaatctttccatcttaacggatacgagagaccgagcggcgctatttcctcgttccaccgctctttattaatcgcaattgccagcttctccacttcataaccgtaccaataaccatctttatctttaacagtttttgaaatacgatttgcatgttggcttatcacaggaatagaaagatttttttgcttcatcatttgatgcgcatctactgtaccgccaataataatatccgccttcggatttccagcttcttcttccactctacgaagaagttcttctgttgaaagacgaataaattcatacgtacatccgcgcggcttacaaaatgatgaaagtaacgcttcaccaacttcctcacgagccgctacatacgcaacaatatgacgatcatccaaaatagggagaccatttttactatatttaatagaggttgtatctcgagagcaactagacatcgctcctccaattactagcaaaaagaagaaaaaggctatctttctcatgacgcattctcctttacgaataactctgctagagagcctttcatatacatgacatttccgttattatcaccgagatattgcacaacaaagtacgatggatacacagaaatcgtaagaatatcttcacgatcattttttacgcgcttacctgttttataagctgtaatataagcaatcggttcattctgcgattgtaataacttctgaatttctccgtaatctgtaatttgctttgcgtaccaaatagaatcaagtatgtgcgtaagattgatagtacgtaccacatcgccttgacgtactacgacatcctttgctgaagcaaagaaatcactaatacgctctggcgtgtaatacaggcttaataaatacgtttgaagtgctgaaatcatcggatccatgccattctttccgtatacattttccccatactggaacaagtcacctactgcaaaagtacgcttatgtccattcaagtacgttacttctccagtaaatacttgttcttggctcttaacgtcccctggctctattcgaattcggtcaaagaatgaaacaatcgtatgcaaacgaacttcatccgttacaacgatttctccccacttttcatgtcttactttcacttcaattggaagagattcattcaccctttgtaaaacggcttgtttatcatttacaatgttgattcgattatagatttgcttctccataacataaaacaaaacaagagaaacaatcatacaaatgacaaacataagaatttgaaatgatagccttttcatttctgcctacctccaagataaaaaaacgttgtttcgaaaataccgcataattgtttcataaatgtatcatttaaccgctttcaagttttttatgtcttccatccttctcggaagcaaaaatgtaatgaatattgtagtacctatttcttcactactctcaatccgcatgcttccgccctgcttattcataatctcctgacaaatatacaaaccataaccattcccgtaactagaaggaagtgcctttcctttcggagactcattccactctgcaagcaccacttcatctataccgatcccatcatcatgaacaaaaaccttcgcctcatgctcatttacaattacattcatacgaatgtgcgaagcatcactatacttaattgcattatcaagcacatttaagaaaatttgcttcgtcttatcaaaatccgcaacaacatgtacatccgttaactcatttaccacttcaatttcaaactgatttagacgaggtttcacaattgaaactgcttcttctgccaattcctttatattcacaactgtaggagacacttcaaacgtactcgtcccatatttcgaagacttaagcagttcctctacaagtgataataaacgctcactttccaccgccacataacgaagactttcctgtacatcttctttcgattgtaacttcggaattaaatccacataaccgataattgccgttagcggtgtttttagctcatgcgtaatgcggtctagaaaatctttctgcttttctttctcctcctgcaactgcttaatatgcagctcaattccatcggccatcgcattaaaagatgctgaaagctgagcgatttccacatactcatttaactcaatcttactcttataatcaccattcgcgagccgctgtgccatttgtctcaactgatcaattggtttatgaagagacttcgccaaacgaatcgcaaagaaaatacccgtagctactaaacaaagagatgtcattaagaaagtccagctcacatttgttaaaacttccttctcacccgttaactcatttataaaacgaatacttccaatgacatcgtttccataataaaccgggcttgaaaacaaaagaataggagctggatccgcctcctcaaaaacgtaagacttcttccccttcaaagaactctcaatgtcgatgttacggtgaagcaatgctcctttttgtgtatctgcaacaacatcgccattcttcccgatcatctgcacacggacatccatacgcttcgctaaatacgacgcaattaaaagtgaattcggaccaagcgtatccacttctgcttccttctctaaataattcatcgtataaatttgtgcttctacacttaacttttctaaagaatctgctgcgttatgatacatattcttttctaacgtaatataaacaactgcatataaaagaacaaaaatcggaattaacagcccaactattccaaacaccatatttcgctttaaagacataccatcaccacttaacaatccagtttatagccaacgccataaattgtcttaatatattccccgctcgtcccaagcttctttcgaagtctctgcaccataatatcaactgctctcgtatttccgatatactcaaatccccatactttctcaagcaactcatccctcataaacacacgctgcggatttgaaacaaataactgacataaattaaactctcggtacgttaactgaatctcttgtccactcacatgtacctttctttccttaggacaaatcactatctctccagcctcaattacttcatgacttacagccgcctccgtcttctttacacgccgcgccatattcttaacccgaagaataagctccgcataattaaacggcttcgtcacataatcatcagcaccaagctgcaagccaagcaacttatcattcatctgactctttgccgttaacatcagcaccggaatatccctatccctctcacggaacaaacgaagcaactcatacccatccgtatccggaagcataacatccaaaatcaatacatccggcccttcattccatctctctaaagcttctctcccatcagccgctgccaatacttcataaccttccatctccaactgcatccgaatcaaattacgaatactcgattcatcatccaccacaagtattttcatcattctcctccttccaccacgtattatagtacagtttagtatagcaaaaatcctataaaaaaagagagggtattgtcgaacatattttgtcgacgataccctctccccttttattatttagctacaaaataatccgttacatattgtgcccaaacttcatgacctttagcagttgggaaaccaaattcttcttttaagtatggtaggatagcctttgtcgatgcatccggccatgctccccaatgatcaatatatgtataattattttgcgttgcaaattgttttaatgcttcaatcgatttcggataatttttcgcaccatacactggattcgatggttgaatcataatcgtagcgccttttgcactagtagaaagtgcttgaacaaacttctgtgtattcacaacagagttcccattaccagttttaccgttatcggtaataaatggtggttcaaataaaatcacatctggattgtctttcgcgatctctttatcacgcttattcgcgattaactcttctgtgctttcacccttatattcctttacagtcacattccataaacccttaccgtaagccgtttctaaattagctgttaacttagctgcccaagcacctttttcagatgaagaaccttcatcaccaacgataacaagatttactgcctttttatcctcagcagctttctttaacttctctttcactgcatctggcaagttcttcgcgtatgcttcgttaaaagatgacttcgcatcttgttttttctcttcctttttctcttctttcttcgctccgctatctttcacttcagcctttgttttcgttacttcactcgtttgtcccgttgcattcgcaatcttcttattccagtacaatttaccgctcacaatcgaagcaacaaacaatacaaaaataacaaggacaagtaccgctttcttattcatcgattcacctcatctattaatctcacaatatataatactaatataaatccatgcaaaaataaacccaactccttccaaaggagttgggttattacatattatttagtcacttcaagatgtgctcttaacttattcgttaaatcttgttttgctgcatccggaacatagtagtaccaaataccatcagcggctttgtggccgtcacctgggatttgaatttcttcactgttcttcaagcaatctttatagttcttttgcatatcaaacatttgatcttgcgttaagtttgttttcacgttcttttgaattgctgttaacacatcgccatagcttgttaaagaagagaaggttgcacctttcttaataacagcttgcatcacttgacgttgacgcatttgacgaccgaagtcgcctcgtgggtcttctttgcgcatacgtgtatatgctagagcttggtcacctgttaagtgaatattccctttctggaagtgtttcccttctagggagaattctaaatcattattaacatcgacaccgcctactgcatctacaatatctttaaatccttccatgtttacttcaatatagtaattgataggaacatttaagaatttttctactgtcgctacagacatgtctacgccaccaaatgcgtacgcatggttgattttatcacttttaccctttccaacgatttcagtatacgtatcacgaggaatacttactgttttcattgaattatttttagggtttaatgtaatgaccattaaagaatctgaacgtcctttatctccaccacgctcatctgcacctaatagtaaaattgaaacaggttcagatttattgattttttcttctggtttattaccttgatcgcgttttaatggtttatgaacttcatctaatgtttttgaaacagaagaatatatattataagcgtaagctcctccacctataattagtactcctataattcctaatatccaaaataggattttctttttcatgcttttaaccttctttcttcaggtaccgctatcaaattattataactacaaaatataaaatacattatacatgtaattcaatttttaagccaaactatattgataactcaatgaaagttttagcaacctataaccaattctctagttactaactttttgatatccagtcttattttcagactgccacctccaagaatctgcacacatttcttctaatccgcgtgttgcctcccagcctaattcacgctttgcttgttcaatccttagtagctgcttaatatatttgtctaattttttgggttcagttcattttgatagtctttttttgttgtatggattgaattatataatgtattgcaaatagaaataatagaagtaatgcggaaaggcggtggggggaaatgaaatatccagaccatttagtaaaacaagtgcaagagcgcagtgctccttatcaactagaaggttttttaagtggacaaggtcctgaaaatcccaaatttatgttgttaggagaggcgcctggtgaaacagaaattcataatgggattccgtttagcgggagggcgggaaaacaattaatggattttttagagcgtattgatgttacaagggaagaagtatatattacgagcgctgttcgaagtagaccttataaatggcgagagaaaaaagaacgaaatggtgaaatcatacaaaaaaagtataatagaacgccaaatcagggagaaatagttgcccatgcgcctttgttagattatgaattagagaaaatacatccgaagcttatcgtcacgcttggaaatatcggtcttcaacgtttaacaggaaaaaaaaaaacaatcacagatgtacacgggcaattattaaaacagcccattcaaaaattaaaggatatgcaaagtgcagagtttacatggtcagagaaagaatatcatgtttttccgacttttcatccagcttccattttttataatcggagtttattggagcttattcatgaggattttgagaagcttaaaagacttgtaataaaaaactagaaaagctaaggcgcttttctagttacatttaattatgtaaagggtttttattttcatctaacgtaaatccttcaccaactacatcatgtacatcacttacagcgacaaaagcatgaggatctacagaagtaatgatattctttaatttcacgatttcatttttagcaacaacgcaatacaatacgttacgttccacttttgtatacgatccaacagcttttaaaaaggttgctccgcgctccatttcagataaaattttggcagcaatttcatcgtttttctctgagataatagtcgctcctttggcagcataagctccttcttgcataaaatcaatgactttagcaccgataaaaacagcaactagcgtatacatgccctcgcggtatgataaataggtaagaatagagactacgataacgacagcatcaaacataaacattgttttccccatactccagccaacatatttgtgagctagtcgtgcgataatatctacaccgccagtagtcccgccatatttaaatattattccaaggccgataccgataaatgccccggcgaataaagctgcgagtgtcatatcattttgcaagtttaaatgtaagttgagtacttcgtaacgctggaaaatccatagaaataaagatacgctaaaggtgccaattaatgtatataaaaatgtcgttctgccaagtaacctccaaccaataaaaaatatagggatatttaaaattaagtttgagtaggaaggatcaaacttaaataaaaaatacaataatagtgtaataccagtaaacccaccctctgcaaggtggttttcaatattgatattgacaataccgaaagaaaatatagcggaaccgattaaaataaaaataatatttcgcatcttcaattttgatgtcatatagaaatccccctaattatgtaatgattgcattgctccgctgaaacagtaaaacataataataagtaatttctagttgctagtgaaaatagtaagaacttgattgatgtgggctgatcttttgtgaaaagcacaaaagaaggtttcacgttatcccgctctaacggctgataggagatgaagcaaagaagaggggcaaaccagccgtaggaacccgattagttcaactaatcttttgcaaaaaaacgcaaaagaagtttcactttattatagtctatccaaaaatgggtcgcaaataggtgtttggcggggaataatatttgtcaaatcgcgatgaattggctaacatgaaagaggaaggattagaggtgaatagtatggaagcaaaaacgatgaaagatatgcagaaagaagtagatgcatatattggtcagtttaaagaaggttatttcagtccgcttgcaatgatggctcgtttaacggaagaaatgggagagcttgcaagagaggtaaatcattattatggtgagaaaccgaagaaaacaactgaaaaagaaagaagtattgaagaagagcttggagatgtattatttgttatgatttgtatggcaaatagtttaaatattgatttagagacagcacataacattgtaatgaataaatttaatacacgtgataaagatcgctggacacgtattgatgagggagagaaagaataatgaaagaaattaaagtaattatcgccggaccaagaggacgtatgggacatgaagcagttcttcttatggaaagaacggaacattttaatttagtagcagcagtggattataagcatggtggtgagaagatttctgatttacctggcatgccagcattacatgcaccgatttacgctgatttacatacttgtttagatgaagtagaagcagatgtgttgttagatttaacaacaccagaagtggggaaacaacacgttacacttgcagttgagcgtggacttcgttcggttattggtacaactggatttacagaagaagaattggcacgtttaacagagaatgcaaaagaaaaagcagtaggaacaattattgctccaaactttgcaattggtgcagttcttatgatgaaattctcacaaatggcagcgaaatatttccaagatgttgaggtaattgaattacatcatgatcaaaaattagacgcaccatctggtacagctgtaaaaacggtagagttaattcgtcaaaatcgtgaatcaaagcagcaaggtcatccaaaagaagtagagcaactagcaggtgcacgtggtgcaaatgtagacggtattcacattcatagtgtacgtttgccagggcttattgcacaccaagaagtaatgttcggtggagatggacaaatgttaacagttcgtcatgattcattcaatcgtgcatcatttatgtcaggtgtaaaactatcaattgagacagtaatgaaccttgatcatcttgtgtacggtttagaaaatattatcgactaaaggggagacaacggatgaaaattgccttaatcgcacatgacaaaaagaaaaatgatatggtttcgtttgcatacgcatataaaccaatttttgaacaacatgaattatttgcaacaggaacgacagggcttcgtattatggaagcgactggattagttgtaacaagatatcaatctggccctcttggtggagatcaagaaattggtgcaatgattgcaaagaacgatttagatatggtgattttcttccgcgatccattaacagcacagccgcatgaaccggatgtgaatgcattgcttcgtttatgtgatgtatatgcgattccacttgcaacgaatatggcaagtgctgaaatgttaatgcacgcattagagcgaggagatttagattatcgtaagttaagaaaatgaggggaacaattatgagtggattacatatattagcgtttggtgctcatgccgatgatgttgaaatcggcatggctggtaccatcgctaaatatacaaagcaagggtatgaagtaggtatttgtgatttaacagaagctgatctttcttcaaatggaacgatagagttgagaaaagaagaagcgaaggttgcagctcgtataatgggagtaaaaacgaggctgaatttagcgatgccagaccgtggtttgtatatgaaagaagagtatatacgtgaaattgtcaaggtgatccgtacatataaaccaaaactagtttttgcaccgtactatgaagatcgccatccagatcatgcaaattgtgcaaagcttgtggaagaggctattttttcagcaggaatccgtaaatatatgccggaactttcaccacatcgtgtggagtctttttataattatatgattaatggttttcataaaccgaatttttgtatagatataagtgagtacctctctataaaggtggaagcattagaagcgtatgaaagtcagttttcaacagggagcgatggtgttaagacaccgttaacagaaggttacgttgaaactgtaatcgctcgtgagaagatgtttggaaaagaagttggagtcttgtatgccgagggatttatgagtaagaaaccggttttattacatgctgatttattagggggatgtaaatgaaattaaaaataggtattacatgttatccttctgtaggtggttctggagttgttggaacagaattaggaaagcaattggcggaacgtgggcatgaaattcactttattacatcgggtttaccattccggttaaataaagtatatccaaacatttattttcatgaagtgacggtaaatcaatactctgtatttcaatatccaccatacgatttagcgttagcaagtaaaatggccgaggttgcacaaagagaaaacttagacattttacatgtgcattacgcaataccacatgcaatttgtgcatatttagcaaaacaaatgatcggagagcgtattaaaattgttacaaccttacatggaacagatattactgtgttaggttccgacccttcgttaaataatttaattcgttttggtattgagcaatcagatgttgtcactgctgtctcgcattcattaattaacgaaacacatgagcttgtaaaaccaagtaaagaaattcaaacggtatataactttatagacgaacgtgtatatttcaagcgtaatatgtctcaattaaagaaagaatatggtataagtgagagtgaaaaagtacttattcatatttcgaatttccgtaaagtgaaacgtgtgcaggatgttgttcaggcatttgctaaaattgttaaagaagtagatgcgaagttgcttcttgttggagacggaccagaattctgtacgattttacagatagtgaagaatttacatattgaagatcgcgttttattcctagggaagcaagataatgttgcagaactacttgcgatgagtgatttaatgttgcttctatcagagaaggaaagttttggtcttgttttattagaagcaatggcgtgtggtgtaccttgtatcggaacgcgggttggaggtattccagaggttattcaacacggggaaacaggatatttatgtgaagttggcgatacaacaggagtggcaaatcaagctattcagctattaaaggacgaggaacttcaccgtaatatgggagaacgagcaagagaaagtgtttatgagcaatttcgctcagaaaaaattgtttcacaatatgaaacgatttactatgacgtactaagggatgacaaaaatggaaagatttaaaaaagctagttctattattgagacattaaagcaacaaggacatgaggcttactttgttggtgggagcgtacgagatcttattatcgataggccgattggagatattgatattgcgacatctgctctaccagaagaagtgatggctatattcccaagaaatgttcctgttggtcttgagcatggaactgtaattgttgtagaaaatggtgagccttatgaggtaactacttttcgaacagaaagcgaatatgaagattttcgaagacctagtagtgttcaatttgttcgttcattagaagaggatttaaaacgtcgtgatttcacgatgaatgcaattgctatgacagaagaaggcaaaatggttgatttatttgctggacaggaagccattcaacagagagaaattgtgacagttggaaatgctgcggatcgttttcaagaagatgccctgcgaatgatgcgtggtattcggtttgtaagcacgttaggtttttcattagaaatgaaaacgaagcaagcgattgaaacgcatgggcatttgctagaacatatagcaattgagcgtattacagtagagtttgagaaactgttaactggtacatattgtgtgaaaggtctcaaagaattagtagagacgaagctattttctcatttgccatatttacaaatgtcagaagagagactgttaaaagctacgcagtataaatgggattctttcgaaacggatattgaggcgtgggcatttttcttatattgtatcggagaagaacatccatctgtctttttacgtcaatggaagttttcgaataaaaaaataaaagatattgttgcagttttattggcaattcgtactagaaaggagaaggattgggatacagtccttctttataaaacgggaattcatatcgctgaaatggcagagagagtatatgaagcgatgattgaaagctatgaccctacatctgttgaacgagtacaattaatgtttcatgcattgccaatccaggaacgtcaagaaatgaatgtgactggtaatgatttattaaactgggcaaacaaaaagcctggtccgtgggttgctgaaatgcttcagaaaatcgaagaagcaatcgtacaaggaaacgtagttaatgagaaagagcgtataagggagtggctgcaaggatgcaatctactataagaaagcagttattgcaagttttttctgaagcggatggcgagtttgtatccggccaaacaattagtgataaacttggttgttcaagaactgctgtgtggaaacatatggaggatctgcggagtgagggatatgaacttgaagctgtgcgccgattaggttaccgaattgcaagtaagccagacaaagtgactgctaatgaaattcagttagggctacaaacgaagcggattggtagaacagtgtattttgaagaaactgttgaatcaacgcagcacattgcagcaaaacttgcttatgaaggtgcagaagaaggaactgtcgttgtagcagaagaacaaacagcgggaagaggtcgtttaagcagaaaatggcattcaccaaaaggaacagggatttggatgagtattattttacgcccgtcaatcccagttcatcatgcaccgcaacttactttgttagcggctgttagtgttgcacaggcaattgaaaaatgtacaggtgtaaacgtaggaataaaatggccaaatgatattttaattcaaggtaaaaaggctgtaggtatattaacagaaatgcaagcggatcctgataaaattaatgctgtcattatgggcatcggtattaatgcgaatcaaaagcaagaacattttgatgaagaaattcagcacatcgctacttcattagcgattgaatcaggtaagccgattgttcgtgcagaacttatgcaacaaatctatttacaactagaaaaattatatgaagaatatttacaaaatggtttctctgtcattaaaattctttgggaaagttacgctgtgagcatcgggaaagaaattaccgctcgaacgatgagagagacaattacggggttagcaaaaggaatcacagaggatggtgtattacttctggaggatcatgaggggaaagtacatcatattcattctgcagatatcgaaattaagtaaaagaagttcctcttttggaacttctttttatttcaatagttttgagttgaatttgtaacatgataataaattcttttcatatttaaagttcatttcaaaatagcttccgtcgagttgacctggcatgttatttgacgattactttgcctgtcattcctttaagaagatggtatcgacatattaattcatatgtaccagtatttttaggtttcacggtaatattcttttcttttcctgactggactacgacgtcaataccgagttttttcactgtaaaggtgtgctcgtttttacctttatttttcaatagtaatgttgttgatccttcaagcggaatcgtgatgacatttggattaaagtaatcatcatttagttcaacctcaatcactttcgttaaatcggtgggttgtgttacgacatgaactgaggcaaatacttgggaggatcctaaagacatccaccatacaatcattacaagcaaactgctgaatcgaaataaccacctgttcatagacatctgcaattctcctttgttaagtactttcctcaattaacctgcatcattagtttaagagttatactatatagttaaattgattacagaaaaaattaacttggacttttttaacatgcgttgaaaaaacatgtatcttttcaggattgaattatccataaaaactgtatagcatatatactctcgtgttaaatttcatataccgtaataagaataaaaaattattttttcgaaaaaatgtagtaattcctttttgtagtttgctataattagttcgaatgtgggcagtatcagagcgaactgcaccatgattcgaagtcatacgaaaaataataacttggattctgccttgatccaataacggactgggacagagggatgaataatgccgactaacacacaacccttctgcccttttatggccagaggggtttttttatatgatttcggccatctcctctctcctgcataaaggaggagtagtttttgaaaacaaaaacagattttttgaagatgaaagagcaaggtgagccgattacaatgctaacggcgtatgattatccatctgctaaattagcagaagaagctgaagttgatatgattctagttggagattctcttggaatggttgtactcggatacgattcaacagtacctgtaacagtagaggatatgattcatcatacgaaagctgtacgccgcggagcgaaagagacgtttattgtaactgatatgccatttatgtcgtatcacgtatcattacaagaaacgatggtgaatgcacgccgcatcgttcaagagagcggggcacacgcactgaaggtagaaggtgctggagaagttatatcgacgattcaatatttgacgaacgcaggaattcctgttgtagcgcatttaggtttaacccctcaatctgtaggagtgttgggtggatataaagtgcaaggaaaagatgcggagagtgcaaaaaaattaatagaagatgcaaagaaatgtgaagaagctggtgcaatagcgcttgtgttagaatgtgtaccaatgcagttagcagaacttatttcagagcaactaacaataccgacaattgggattggcgcaggacaaaaagtagatgggcaagtgcttgtttatcatgatcttatctcatacggcgtaaatcgtgttccgaaatttgtgaagcaatatacgtctgttcaagaggagattgtgcgtgggatttcacaatatgttactgaagtaaagacaaggcaatttcctgaagaaaaacattcgttcacaatgaaagaggaagaatgcttagcgttatatggaggaaaacaataatgaaaatcgtaactacagtgcaagagatgcagcaaattacgagcgaacttcgtgcaagtggaaagagtattggttttgttccaacaatgggttatttacatgaaggccatgctactttattacgtaaggcaagagaagaaaatgaaactgtagttttaagtgtatttgtaaacccactacaatttggcccaaatgaagatttagatcgatatcctcgtgatattgatagagatgaaaatgtagcaaaagaaaacggtgtagattatttattttatccgagtgtagaagaaatgtatccagcagaacaaacaacaacggtagaagttgtgaagcgcacggacgtattatgcggtcaacaaagacctggtcattttgctggtgttgcaactgtactaatgaaactatttaatattacgctgccaaagcgtgcttatttcggtatgaaagatgctcaacaagttgcagtaattgaagggtttgtaactgatttcaatattccagttacaatcgtaccagttgatattgtaagggaagaagatggtttagcgaaaagttctcgtaacgtgtacctatcacaagatgaacgtgaagaagctcttcatttataccgcagcctatgtatagcgaaagaaagaattgaggcaggtgaacgtaatcccgaaatcattacaaatcttgtgaaagagtatattgagacgcatacgaaaggcactgtagattatgcagatttatatgcatatccgtcattaacaatggtagagaaagtcaaaggaagaatcattttagctattgcagttaagtttgaaaatgtaagattaattgacaatataacattaacagttaaataagggggagcatctatgtttcgcacaatgatgagagcaaagttacatcgtgcaactgtaacggaggcaaatttaaattatgtaggtagtattacaattgatgaagacttaatggatgcagtaaatattgtagaaaacgaaaaagtccaaattgtaaataataataatggtgctcgcttagagacatacgttattaaaggggaacgcggtagtggtgttgtttgtttaaacggtgctgcggcaaggcttgtacaaccaggggacaaagtaattattatttgttatgggctagttacggaagaagagattcataaacaagaaccaaaaattgcagtattagacgataataatcaaattattgaaatgttaggtgctgaaaaagcgggtacgatattataagtagaaaggctatctccattgcggagatagcttttttgtgcatcttttcattaagatgagataaaacgtggtatagtaacattatataaattattgttgtttgaaaggtaagaaattgaggtgttacatatatgagtaagcgttatgtcgttgttgatttagagacgacagggaactcctggaaagatgggaaggataaaattacccaaattgcagctgttgtagtagaagatggagagatattggagattttttcgtcttttgttaacccaaagagagagatcccaccatttattacagaattaacagggattgatgaaagtcttgtaaaacaagccccgttatttcaagatgtagccccgatgattgttgagctattacaaggtgcggctttcgttgcgcataatgttcactttgattggaattttttaaatgaagaattaaggcaagctggatatacagaaatacattgtccgaaaatcgacacggttgaattggctcaaattcttttgccgacagccgatagttataaattacgtgatttagctaagaagcatgaactagagcacgatcaaccacatcgtgcggatagtgatgctcttgcaacagcggaattatttttacaatttttaaatgaaattgaaaagttaccacttgtcacgttgcaatcgctttatgaattaagtgatgtgttccaaagcgatatagctgatgtgctttctgaaaatattttaaagaaagtaatgcacggtaaagaagatatagcggagtatgaaatacatcgaaatattgcgctgaaaaagcggaactattccttaaaccttggagaaacgtgttcatcaaagtttgatgctttcttgaataaaacgatggataaattggaatcacatatgccaaagtttgaaagaagagaaagtcaacaactgatgatgaaagagatatatacggcgttaagagattctcgtttttcactaattgaagcgggtacaggaacaggaaagactcttgcttatttgcttcctagtctttattttgcaaagagaaaagaagaacctgtcattataagtacacaaacggtacaactccaacaacaaatattagaaaaagaaattccgttattacaaaaaataatgccattttcatttgaggtagctcttctaaaaggaagaaagcattatttatgcttacataaatttgagtatgctttgcaagaggaagaaaaaaattatgatatggcacttacgaaggcgaagattttagtttggctattgcaaactgaaacaggtgatcgagacgaattaaatattcctgagggcggaaagttactttggaatcgtatttgtagcgatgcgtatagtccaggcggtatgcaaagtaattggtttagtcgttgtttttatcagcgagcgaagaataaagctttatttgcagatatcgttattacaaatcatgcgttattatttcaagatttttcaagtgaagaaccgttgtttgcttcatgcgaacatattatttttgatgaagctcaccatattgaagaagctgcgagtagaacattgggtgaacagttctcttgtatgtattttcaattggttatatctcgtcttgggacgctagaaacagaagatgtactctccaaagtatataaaatgatgaaaaaatcagagcaagcatctcgttcaactttccgtatgataagttatagtttgaaggaacttaagtttgatgcggatgaactcttccaaatgttacgtacttttatatttaaacaaacaaagcaagagcaaggaacgaataatatgccgctcatctataggtataacgcagaactagaaaaaggtaagttgtgggatagtatcgtcgaattaacaaatcgttttatatatgaattaagaagggtagtaactgctcttgagaagcaagtggatatattgcaaagtaagttagaatgggagatgcatgttgtaacaggtgaatttatgcatttaattgagttgctgagaaagatggcagaatcattacagttactcgtattagaaaagaattcgtatgtaacttggatggagactgaaacgaaagggacgattcattcaacagttctatacgcacagcctgtccatattggtgaaagatttgctgatgaatttttaacagaaaaaaagagtgttatttttacatccgcaacactaacagttaacgatacgtttgattatataaaagaggaacttggtttacatgatttcgctccaaatactttaaaggttccgtcaccatttcgttatgatgaacagatgaaattaatggtttcaacggatgtaccttttattaagcaagtaagtaatgagcgatatattgaatctgtatcggaacatattgcaaagatagcaaaagccacaaaaggcagaatgctcgttttattcacttcgtatgaaatgttaaaagaagcgtatgcgaatttaaaaaataatgatgaattagagggttatttattactcacccaaagtgtgaataatagaagtcgaagccgcttaattcgaaagtttcaagagttcgacaaatcaattttattagggacgagcagtttctgggaaggaatagatattcctggagatgccttaagttgtcttgttatagtccgtctaccatttacacctcctcatcagccgatgatggaagcgaaaggtgagtggctaaaaaatcaaggtgaagatgtattcgctaaattagcgctcccacaagcaatattacgtttcaaacaaggattcggccgcttaattcgaacgaatacagatacaggaacggtagtagtgttagatcgtcgtttgacgagttcttcctatggaaaacgatttctacaatcgattcctaacgtacctctttatgaaggaccattagaagaattgttagtacaattagaagaaccatcaaatgaataaaaatggaagaaaaatacgcctgaagtacttataaacttcaggcgtaaaaaatgtgggtaggaggaattttattttttttacttcttgtatacaaaatgtgttggttttcgacttgaaacctttttttgctgtacatgtcctgctataatagatgggtgatgaagcaggggttgtaaagaatgtactcttattgtaaccgcattgcgttcttctataattagaaatttttgtgtaacggaggagttttttcatggataagaaaatcgaagtactatcaacgacgcgtattaaatattcgtcggatttgtataaaattgttgatagtttaaatcgtacgttaaaagagcaggacctcatgttcggactagcattagacgaaaaagataaagaaacagctgtatttacgatttacagaacgtagtgatacaatgaaaaagtggatttttgcaatcattattgttatcgttgctagcggaatatatggggcgtatgtttataataaagcgatgggaaagaaaattccaaaagagtcgaaatttgtagaaattgctaaagaaaaagcaaagcttacaaaggtgaaatctgttgattattacaacggaaaatctgcatatatagtcgtgcaaggtacagatgaaaagggagaacaacttatcgtttgggtgcctgagaaaaaaggggatactgtagtaaggaaaaagagcgaaggtatttctgaaaaagaggctatacaaagaacaatagagcaagtcggcaatgaaagtaaggaatcaaaaagtaagccgaaagagattatgaaagtgaaattaggctttgaaaatgatgtaccactatgggaagttacatatattgatgatgacaatcgttatagttattactatcttgaatttaaagatggaaaatttttaagacgatatagcattgaaaaatagatgtagggggaactacaaatgaaattagcaaagcgagtagctgctttaacaccgtcttcaactttagaaattacagcaaaggcacaagcattaaaagcagagggtcatgatgtaattggattaggggcaggggaacctgactttaatacaccagagcatattatggatgctgcacataaagcgatgttagaagggcatacgaagtatacaccaacaggtggattacaatcgttaaaacaagaaattgtgaagaaatttactcgcgatcaaggtattgcgtatgatccatctgaaattattgtatgtaatggtgcaaagcatgcattatatacattattccaagtattacttgatgagggagatgaagttatcatcccaactccttactgggtaagctatccagagcaagtaaagcttgctggcggtaagccggtttatgtagaaggtttagaagacaatgagtacaaaattacagcaaagcagctgcgtgaggcaattacagagaaaacgaaagcagttattattaattcaccgagcaatccaacaggaatgatttatagcaaagaagaattacaacagcttggagaagtatgtttagaacatgatattttaatcgtttctgatgaaatttatgaaaaattaatttatggtggcgtagaatatacttcaattgcccagctttctaatgcattaaaagaacaaacacttattattaatggtgtatctaaatctcattctatgacaggatggcgtattggatatgctgcaggaaataagcagcttattaaagcaatgacgaatttagcgagtcatagtacgtcaaaccctacttcaatcgctcaatacggcgcaattgcggcatatgcaggctcacaagaacctgtggaaacaatgcgtcaagcctttgaagagagattaaacatcatttatgataaattaattcaaatccctggctttacttgtattaaaccgcaaggggcattttacttattccctaacgtaaaagaagctgtagctttatcaggatatgcaacagttgatgattgggcaaaagctctattagaagaggaaaaagtggctcttgtaccaggtacaggatttggtgctccaaataatgttcgtttatcatatgcgacatctcttgaacaagtagagaaagcattagagcgcatccatacatttatgaaaagtaaagtgcaagcttaattttatatttcattcatgtaatataaaaaacctccctattaatggggaggtttttttgacggattgtggcaaaaagaaatagctaaaggtgtgttatactagagagcgaggtgtttggtgatgaaaaagaaaatgatgttacagtggtttgagcagggaagcattgcaattccaaaattgcttatgatgcattataaaaaattaggtttaaatgagacggaatttatggttgtacttcatgtacacacatttttagaatcaggtaattcgtttccgactccttcagagatttctgaacggatgacgataacggaaatgaaatgtatggaagtaattcagacgttgattcaaaaaggttttttatcactagaaggtggacaaagatcagaagcgatgatgtgcgaaagttattctttacaaccgttatgggaaaaaatattacatttcttaatggatgaatcaatagaggaagagcaaaaagaaaaaaaacagctacaagtaaatttatatacagtatttgaaaaagaatttggaagaccactttcgccgttcgaatgtgaaacgttagggatgtgggaggaccaagatcaacatcatccaaatttaattcaagcggctcttagagaagctgtaatgagtggaaaactaaatttccgatatattgatcgtattttatttgagtggaaaaagaatggaattaaaacggtagatcaggctcaaaatcaaggtcaaaaatttagagcgaatcaacaaagggcacaacaaatgacaaaacaagagacgaaatttactggaaaagtgcctttttataattggttggagcagtaatataggaggaaaaatatgcttaacaaaacgcaaatccgttattgtttagacacaatggcggatatgtatccagaagcacattgtgaattggttcatgataatccatttgaacttgtaatcgcggtggcgttatctgcacaatgtacggatgtacttgtaaataaagtgacaagaaatttatttcaaaaatataaaacaccagaagattatttaagtgtttctctagaagaattacaacaagatatacgctctatcggattgtatagaaataaagcaaaaaacattcaaaaattatgccgaatgttattagatgactataatggagaagtaccgaacgatcgagatgaacttacgaaattaccaggtgtaggaaggaaaacagcgaatgttgtagtttccgtagcgtttggaattccggcaattgctgttgatacacatgtggagcgagtgagtaaacgattagctatgtgtagatggaaagactctgtgttagaagtagaaaaaacattaatgaagaaagtaccaatggatgagtggggagttacacatcatcgtatgattttctttggacgttatcattgtaaagcacaacgaccgcaatgtgaggaatgcagactgttagaagtatgtcgtgaaggaaagaagcgaatgaaggtgaaataaaggatggaacgagttatagaaataccgaaagaatttcactgtttaccattttttaaagaaagtgtaaatttaattaagtatcatacagacaattcttttgaagagataatacaaaatacttactttatatttgatattgaaagacagtatgagccatggaaggaaattgaaaacagcattccagtgatgttgaatgtatggaaaaataagcatgaagacattgctatactgtttcgaaatagaaataagcaagaggctgagggaccaatgattctttttgcagctcacttgttatcggttgtctattggctaaatgaacaacctgttcatagtttgaatgaaatgcaaataaatacgaataaattaaaagtgcaacctgttaattttatggaaagatattcattcattataaagaaaccgagtaattatcattcttatattcaattagcgcagttgtatatcgaaatagaaaagctgtatgtaaagaaaatgataacaaaaaagaagtccgcttctcgttaagagaaacggacttctttttttgtatattaggactctgttgtaacaacagcaccgtctgcgtgaggtgtatctcctccgggattttggtgttgctgttcttgttgtttcttagcctcttcttcagcttttttcttggcctcttcttcagctttcttcttagcttcttcttcagcttttttcttagcttcttcttcagctttccttctagcttcctcatcagctttcttttgagcttcttcttgctgtttacgttgttgttcttgctgttgctgttcttgttgtttcttagcctcttcttcagcctttttcttagcttcgtcttgttttactttatcttcattagcctttttctgggcttcctcatcagcttttttcttagcttcttcatcggcctttttcttagcctcttcttcagctttttttgcatctggagttccgccaggcgcagtgaaggatgcaccaactgctgggcttgttccagtgccttttttcgctactacagagaagctgtaagtaacacctggtttaataccaccaagagtagctgtcgtaccacttattgataggctaccacttgaaccgtcagttgctttatagctggctgcatatgcatcaacttctgctggtccagaccagtttagtgtaactgtgctagcgccatcaaaagtgacattcagaccactaggagcatctactttaatttgtttaattgcatcttttttcgcaccttttacgtataactctccgtttatttcttgtacagaagaaggacgttcaaagcgtgatttatctgtagcgaatttgctcatcattacttggaacatttgctgtgcaattctagtggagcgatcgctaacataattttttggaccatctttttcgtaaccggtccaaacagccattgtgtattgtggcgtatatccagcaaaccagctatctctgtttgcatcagctgggatgtcatatttttgaagaactgattcatcaaagttttgtgttcctgttttacctgctacgtcaacacctgaaacgtatgctgttggacctgtaccaccagaaccaggttttactacgtcacgaagaacgtcagtaaccatataagctgtatagtcttgcattgcgcgatgttctttcggtttaaagcttttctttttcccgtccgggaaggttacttcttttacgaagtgtggtttattatagttaccactattaccaaaggttgcatatgcacctgctacttctaatggagaactatcgttactaccgattgctgttgattcgtagacttttccttctttaaaggtcatgcctaaaccttcagcaaattcttttgacttattaagaccaactgtttgtgctgtctttaaagctggaatgtttaatgattttttcaaagcttcacgtagtgaaacgtcacctttgtaactctttgttgcattttgtattttcttaccattggaatacgtatactctgagtcgtttaattgatggtatgtagaccattgtaaattttcaattgccggaccgtagtcgaaaattggtttcattgttgaaccaacttggcgttttaaatcagttgccatattatgacctttgaaagtagacttactttctttacgtccagcaccaattgctcgaacttctccagactgtgtatccataaatacgaatgacccttggaattgatcgtccggatacttaataagattgccatccataattttgtcggcgtaatcttgagcatcttgatcaagtgttgtatgaatcgttaaaccatctgaaccgatatttacatcaggatattctttttcaacttcttttacaactgcatctaaaaatgcttgatacttcatctcagttacttctgaagacggttgaaggccctcagttactggaatcttaacggcgttattcatttcttcttttgttatataaccatgtcgattcattaatgataatacgacattacgacgatttgttgctcgttcaacattttccttttttgttggatcataaatgtttggaccttggggtaaaccagcgagcatagcagcttcatgtaattgcaagtcttttaaatctttaccataatatttttgcgctgctgtcgcaataccgtatgaacggttacctaaattaatcttatttaagtacatttctaaaatctcatgtttagagtattgttgctctaatttgtaagataagtaccattcttgcacttttcttttagcagttttgtccatcgttagaaagtagtttttaacgacttgctgtgtaatcgtactaccaccttgggaaccgaaaccaccagtgacattttccataactgcttttgtagttcgtttaaaatcaattccattatgatcatagaaacgcgaatcctcagttgcaagaaatgcattttcaactacttttggaatttgatcataagtaacatgtgttcgtttttcagcaccgtattcatagaagaaatttccgtttttatcgagaaactttgttgataaaggattaacaagtttggatttgtctaattttggagcgtcctttaccataacaaagaaagcggaaacgccggctacaagaccaacgataccaagaagtagacaacctataaggaatttcttgaaaaaggagccttttttctttggtttttcttctttatgtgtttttttctcttgatttttcacatgatttcgttctgtacgagaacgataattatctgacattatactttctcctacctttcattctctcccccaaaagtcgaaaaaagagccttagtgatgactctatcacgaaaaataaaccatgtctagtacacggatatagtcaatccgagggtgataaccgcatgataataaggatccatgctcttctatttcttctttcgtaatcgacttgcgtccaccagtattttgacgattccaaaatgcaataatatgttttgcatctagtaaataaaattcatcaaaaagtgtaaatttaataataacaaatgcaattccattatgagcaacgacttgcttcatatgttcaatttgatgaaggtggaagttttgaagtgggaaactagttttatttttggtttcctttgcttcaaaatcgatgtatttccctttgtatacaccgttgtaatctgttgtagaaggttgtttaaaatacgcttcttttaccactgcagcacttcgagcggggtaatctacttttacaatttgaagaggtgtaggctttttatgtacacatgcaatattatgggttaagtaatattgatttgtttcattcaattcctcttcaagggacatacctctattactataagtatgtgtttttataggtgttttttgaggttgtgaagcttgattatacctttttccatttgggtaacgaatggtcatagtgtgtccacccccaacttgctaagaattacttacaaaggtgattatatcaaaaaatgaaaaaagatgtgacctttttgatgaaaggtatgatgacttatttatgtttacatggaatgattatatgaaaattaaacaaaatcgagaaaaaaatttttgtgcagaggaagaaaaagcaatcattcacaatattaaaaagaaaacagaaatagctaatgtggacaatatttctcggacacaatcttatcaagaatattatttaagaaatagtgaaatcaggtgggcctttttagcgagtatggtttcgagaaatgcgggctggaatatgactgatttagaagggagatattatgctactgttttacctagaacggtaaaaaaacatttatttcttctgtacgaacaggctaattggattatttttttagatgcatttcctcagctattattgtatgaggaaagtaagaagagacatgcacctctctttcatttgttgcaatacttcaacgtatcaatttttatggaaaaagaatggttacttttctgggaaagaagagatacgaatagacttatgacagcgcttattataaatgaacaaaataaaattcaaaaaccagtcattgagaatacatattttaaaaaacatgtattccatactgcactttttaaagtacaagaaagacttcatattagtgcagttatcttcccaacaattgaagggagaatgtatgggttttcggtttatcaatttgaaacgttacaaaagcgtatagaactaggaaaaaaattagcatggttattgtttcatccaatttataatggttcgttttataagtttgcactgcaaactacacatactgggtctagagaagattatgaagtttacgcaaaggaaactcgaaagtcttatacgccaacacttagagatatttatcctgttattttacatgaagaaataaaaatgagagattggttttgtgcaaatatgaaaatgaatgtgctatttgtacttgaagaacctaaaggggaagttaatataacagaatggtatagaagaaagagagaacaaatctataggctatctatcgtaaaccgttttgctaaaaggatcgatgagttcatgatataataaaaaagaagtcccgtcttccattttgaagacgggacttcttaatttgaaaaaatcctgctatgcgtgctacaactttaatttcaaaacgtaatgctagtaggagattaaggatgatttgaaatttaaatgttcgtaataaagtctcgctttatgtagcagggaagtttggaccatctagctttggattgccagtctcgggtttattttgttgtttgttttggtttttctttttttcatttttgttctttgccattgtaatacacctcctttttgtattgttaccatttctataaatgacatacgaaatgatttctttgacgaataacaactagttttgtcatgtgggcaggagtggtgaatcatccggcgaaattacatgacaaaggaaaagcaaagaaggaggcgttttgtatatggcgatggttcagaaggaagatgtaatgaaaaaaatggatcaaatgttaagttctctcgatttgctggaaatgaatatagggattagaatgaatcatgcattaaaggatgcgagtgaaaaaatatgtaataagatagaaataacagaaatgcatattgaacatatggaaaataaattagtgcatcacgaagaaaaagggaattgggtgaagacatttcaaaacgtcgtagtgagtgcataataaggtgggaaagaaatgaagaatgaagcattaatacagtcttcagaaaaactcatgcagtatagtaatgaagcgaatgtaaaaaaaagagaactaactgaatacgatttttataaggatatgaaaccgtttgtagatatggtagatgaggaattaaagaagtggaaagaattagcttatacgtggattaaagaagaaaagccaaagtatatacatgtacagcaaattgatcaagtatacgataatttacaaacgaatgtgttgcaatgctttgtaaataaaggtaaaggtaaacgattctttgaaacacaccaagccatttcgtatactttgcaaaatatagttgagcaatgtaaataacaagagggagagccctcttgttatttttatgcttctgtcattgttgtaggttttgttgcgccgtttatttctaattcttttattaatgttcgataatctgatatgcatatttttccttcgagataccaatgtctcgcaaagtctaataattcatttgcattctctgtgcaatacccctttttttgagaaaacgcttgttttaaatcccctaataccatgttgattcctcccccatgagaatcttcttcttaattatcatagcatggaagggttttcttttttaattttttaaaaatttaaacttccgacaaaaatagacatatattccatcacacatattattttataggtacatattatatatgtagaaacttatgtgaaggaggagagaatgcatgtttcaacaacctaacgtatatcagcaaacgaatccatatgcacagcaaaatatgtaccaatataatacggatacatatttacggtataatatgtatcctttcgagccttattatggaaatcaaaattattatcaaccgtttgaagtgtcctttatgaatcaagctcaacaaccacaacagcagcaaccttatgtgaatcaagctcagcaaccatacatgaatcaaccacagcagcagccttatatgaattcgcaatattatatgccaccaccatcgccgtatgctaatcaacaagcgatgttttatccaccaaaacaaccgtacccgacgcagggtaagcaaaagcaacaacagccaagccagttttctagttttgtttctcaatttaaaacatcagatggtaactatgatgtaaataaaatgatgaatacagctggacaaatgatgaatgcgatgaatcaagtgacaggtattgtaaagcaagttggaggcttttttggtaagtgatgttgaaggattgtctataaaaacaatgtaaatgaaataaaggactagacaaatttccttgtaataaatgggtatatataacaaacggctttctctcttttctcatactgtaaagtgtaatcagatttttttaacgagagaggagagaaaaaactatgcatcattgtcatccttgctttggagggcataagcctacaggacctatttgtacgactgctcctgtcattcatccgacgaaacaatgcgtaacacactctttttcaacaacggtggtgccacacattttcccaacacatacaacacatgtacatcatcaacaaattaaaaaccaaaacttcttcccgcaaacaaattcaaatgtaaatgttgtggacccaatcgacccaggattcggcggcggatgtggaccgtgtggccatggtcatcatggacatcatggacatcacgtatcaccatttggtccaggaccaaatgtatctccgtttggaccaaacgtatcaccattcggaccgaatattggaccaaacgtatcaccattcggtccaaatatcggaccaaacgttggtggaatgtttaaaaagtaaatgatatgttagaactagcgaaatgctagttctttttttgtaattggagtgttgatatgaaagttattgcagtaacaggatataagccatttgaacttggaatatttaaaaatgatcatccaggggtggagtgtataaagaaagcgttacaccgtaaattaaccaattttgtagaagatggtttagagtgggttataataagtggccaattaggtgtagaattatgggctgctgaagttgtttttgaaatgcaagtagaatatccagatttaaaattagcggtattcactccgtttttagaacaagaagaaaattggaaagaagataatcgtgaatattatgaatttatcctttctcaagcagaccatgttgatagtatcacgaaacggaagtatgaaagtccagagcaatttaaattaaaaaatcaattttttattgaaaaaagtgatgcgcttttagcggtatacgatgaagaaaaaccaggaagtcccaaatatattgtagaagcagcaaagaaaaaaggagaaatagaaaattatcacagttatttcattcttttttctgatttacaagatataatagaagaggaacagtggaataatgcagagtaaatatgtaatatagtactcgtatatatgattgacaaaaagcattgtttctgaaaaaatttagttaatgaaagttttggtaaaaatttgaggtgaagaaaatgatttcggataaaattaaattaacagcgaaagatattttagaaaaagaatttaaaacaggtatgagaggttatcagcaagaagaagtagacaagtttcttgatatgatcattaaagactatgaagctttccacaaagagtttgagcaattaaagcaacaaaatgctcgtttaaagcgtgaattagaggaacaaaaactagcagtaacgcaagttccacaacaacctgtacaaacaccagttgcacaaccagtttataacaacacgaatacggatattttaaaacgcttatctaacttagaaaaagctgtatttggaagtaagttatacgaatgatgtaaggtgggaaaaggtttaagcattttacatagaaaaaaacgttgcaaaatctttttgtttccactatactaatggatgtcataacgtttgggtaatcgctgcaacgccaacgttgtagaggaaagtccatgctcgcacggcctgagatggctgtagtgttcgtgcctagccaattcataagctagggtattctggctgtaaggctggtttaacggcagggaaaaaacctaagtcctttcggatatggtttgactacctttaaagtgccacagtgacgaagtccttgaagaaatgataggagtggaacgaggtaaaccccacgagcgagaaacccaaataatggtaggggaatcttttccaaggaaatgaacgacgggaaaggacaggttttataacctgtagatagatgattgccaccggagtacgaggcgtgggccgtttgtagtacaaaggaacagaacatggcttacagaacgttatgaaccaactatgaaataactcagctctcctttgttagaggagggctttttatttgtatgaagttataaagtatgagttaaaatggttaatgagaaaaattttcgtaaaatgtaatgattaataggaccaattgctattaattattgtttgaatatacataagaggtgaatgcaaatgggaaaagttactttaattgcaacagcggcaatgggtattgaagcgttagttgcccgagaagttcgcgatcttggttatgaatgtcaagtagaaaacagcaaagtaacatttgaagcagatgaaaaggcgatttgtcgcacgaatttatggttacgtactgcggaccgtgtaaaaattaaagttggcgaatttaaagcaacaacatttgatgagctatttgaaaaaacgaaagcattaaactggggagattatattccagagaatggcgaattccctgttattggtaaatctttaaaatctgaattattcagtgtttcggattgccaacgtatcgttaaaaaagctgtcgttgaaaaattaaaaacaacatataaacgtacaacttggtttgaagaagatggtccgttattccgtatcgagattgcaatgctaaaggatattgcaacattaacaattgatgcgagcggtgttggacttcataaacgtggataccgtatggatcaaggggaagctccgttaaaagaaacattagctgcgtctttaattaaattaacaaactggaagccagatcgtccatttgttgatccattctgtggatcaggtacaattccgattgaagcagcattaattggacaaaacattgcaccaggatttaaccgtggtttcgcatctgacgagtggggctgggtaggtaaacaaaactggcgtgaagctcgtcaagaagctgaagatttagcgaactatgatcaacaattacaaatcattggatccgatattgatcatcgtatgattcgagttgctcaagataacgcagaagaagtaggcttgggcgatttaattacatttaaacaaatgcaagtaaaagatttcacaacaaaagaggattatggctacgttgtaacgaatcctccatacggagaacgtttaagtgaaaaagcactcgttgaacaactgtacaaagaaatgggacaagtattccgcccattagatacatggtcagcgtatgtattaacaagctacgaagcatttgagaagtgttacggaaaagatgcgtcgaagaaacgtaaactgtttaacggatttatccgtacagattactatcagtacttcggaaaacgtccaccgcgtaattcatagtataaaactcctccagcgcgcatatactggctattatgtaatgcgtaaaggaggaagtgatatggataatttccaattatcaatgattcaaaaagctattcaccgtacgtatgatgagctcggaaaagaagtggatagtcaagatgcgattgtagatgaaatacaaaaagcacaagaagaatatttgtcagctctttcacatgaaacagcgattgataaaaggtatttaaagtcattaatatagaagaaaattttcctttttcgaaaggaaaattttttttcgtgtatttatatgtatggcaacaggagaaagtagctgcacacatataagtagcggttactatatctttttatagaaaaactttttggttggaggctaaggatgtttactgagaagagattaccatttgaagtaggaaaacaagacaatttttatgataagttgaatgagtggattggagatgtgttttacgacatccttccggaaaaaggttttgaagagcgtgatgaacaaatttttatggcgtttcaattagagcgtgctttccaagaaaagaaagttatgttcgcagaagcgggtgtaggaacagggaaaactattgtatatcttctatatgcaatttgctatgcgcgttatactggaaaaccagctataattgcttgtgcagatgaaacgttaattgagcagcttgtgaaagaagaaggagacattgcgaaattatctgaagcgttaggcttatctgtagatgtaagacttgcgaaatcaatggataattatttatgtttacgtaagcttgaagatgttatgagtggacgagctccagaagtaattgaagacgtatattatgaattaccacaattcgtatttgatcatggtacgatgcaaaactttactcactatggtgaccgaaaagaatttccactattaaatgacgaagaatggtcaaaagtaaattgggattacttccaagattgcttcacttgtgattctcgtcatcgttgcggtcaaactctttcacgtgaacattatcgtaaagcagcagatttaattatttgttctcaagatttttatatggatcatatttggacgtacgatgctcgaaagcgtgaaggacaaattccattattaccagaaagtagttgtgttgtattcgatgaaggacatcttgtagaatatgcagctcaaaaagctttaacatatcgtttaaagcaaacgatgatggagcaacttttaacgagattattacaaaacgatattcgtgaagagtttgcacatttagtagaagaaacaatttggcaaacagagcgattctttgatgtgttacaagaaaacaaaaaagaaattgccggttctgatcgtttagaaattactgtgacagaaaaagtaacagctgaagcaaaacgactttatgcgaaaattggtgaagtcggtgatgcgttagtatttgaaagtgaaatgcatacagtaaatacgtatgatttaaatatcgttgatgaacatttagatgtattagaacattcacttcgtctattcatgcatgagaaaaatgtaattacatggggtgaagaaggtgatggagccttcacgttagtaattatgccacgtgcagttgaagaagtattacaagagaaagtattctcgaagaaaatcccgtatatcttctcatctgctacattatctaataacgattcattcgcatttacagcaaatagcctaggggtaaaagattacttatcattctcagttgcctcaccatttgattatgaagagcaaatggcagtaaacttactatcgcatacgaaagaaaatgagtgggaaagaaagtgtcaatatacacttgaaaatatacagaaaacaaacggacgtacacttgtattattccgtacaacgcaagaacttgcagcgtttaaagaatatgtaagtaaagaacaaatgtcagttccgttcttatatgaaggggatcaagaaattagtcagctcgtttctcgtttccaaaatgaagaagagactgtactttgtgccgttcatttatgggaaggtttagatattcctggttcatcattatcacatgttatcatttggtcattaccattccctccaaacgatcctgtgtttgaggcgaagcgtaaacatgtaaatgatccattctgggatgtagatgtaccgtatatgattttacgtcttcgtcaagggattggccgtttaattcgtacgagcgacgataaaggtgctatatcaatcttcttatctgatacagaagatgagaaagtggtagaagcggtgaaaaacgtactaccggtagaaggtaaagaattataaggagaaagcttggcgcttgccaagctttttttctattataaaaggaatttagatttccgtgtcgaattaagtttgaggtagaaaagggaggtttttatacgatgacagtagctacatatgaagtagaaaaacaatttttaacatatgtgaagaagatacaaaattacggagaagcattaagtttaatgttttgggacttaagaacaggggcgcctaaaaaaggtgttgatcaacgttcagaagtaattggtatgctttcatccgaagtgtttgctatgtcgacttcagatgagatggggaactatttaacagagcttgaagctttaatacgtgaagataaactttctgaaacgacgaagaaaatggttgaagagtgtcggaaagaatatgatagaaataagaaaattccacaagcggaatacgaagcgtatgtgaaattagaagcgaaagcagagagtgtgtgggaagaagctcgcgaaaaatctgatttcgaaatgttccgcccgtacttagaaaaaattgttgaatttaaaaagaaatttattacatattggggttacgaaacatataaatacaatacattattagacatgtatgagccaggtattacagtagaagttttagatcacgtatttggtcaacttcgtgagcgcatcgtgccgcttgtaaaagaaatctctgagtctaaaaaaggattaaaaacaagtgctttatcggaaaatttttcaaaagaaaaacaaaagaactttacattagaactattaaagcaattgaattatgactttgaagcaggccgtcttgatgaaacagtacatccattcgagattacattaaatagaggggatgttcgtattacgacacgctatgacgaaaaggatttccgcatggctgtgtttggaacaattcatgaatgtggtcatgctgtatatgaacaaaatatttcagagaaatttgaaggtacaccgttatgtagtggaacatctatgggtattcatgagtcacaatcgttattctttgagaactttatcggccgtaataaatcattctggaagaaaaattatgatttattaaaagagtatagcaatggtcaatttgatgatatgtcagtcgatgaattttatgatgcaattaacgaatcgaagccgtcattcattcgtatagaagcagatgagcttacatacccgcttcatgttatggtgcgttatgaattagagaaagaattatttgatggtacattacaagtgaaggacttaccagcagcttggaatgataagatggaagcatatttaggaattcgtccggaaaatgatgcgcaaggtgtattgcaagatgttcactgggctggtggctcatttggatacttcccatcttatgcgcttggttacatgtatgcagcgcaatttaagcaaagaatgttaaaagacattccgaactttgatgcattattagaagaaggaaacgtaacaccaattcgtgaatggttaacagaacatattcaccaatatggtaaaacgaaaaagccacttgaaattttagaagatgtaacaggcgaagggttaaatgcaaattacttagcagattatttagaagtgaagtataaagaaatttatgagttataaaaaagagctgcttacttgcagcttttttttatagggggatagaagatggtttatacatatacagtaatgacgcaagaagaggcggaagagattgcatataactggcattataaaggggaatattccttttacgatatagaggcagatgaagaagatttagctgagtttttagagggtgagagtagagggaatcatgtattttctgtgaaagaaaatggtactctcattgggttctttacggtttgtaaaataaataatggaacggttgatataggacttggaatgagacctgatataactggcaatggatttggtttacagttcgtgaatgctggactagcttttagcaaagaaaaatacggatgcaaatatataacactatcagtagcgacatttaatgagagagcgataaaagtgtataaaagggcgggatttgaagcggttggaacgtttatacagaaaacaaatggtggttgttttgagttcttgaaaatgaactatatatgtaaacgtgattaaaaaaacagagggatcttctgtttttttattttgatttagaaatatatgatacatattttttactttttgtaattgagagttttgaaattttggtagagggtgtgtatgatagaagtttagtagcaaatagtaggtttagcaaggaagggtagaggtagtatgattacaattaaaacgaaaaatgaaatagatttgatgcatgaatctggaaaattacttgcttcatgtcataaagaaattgcgaaaatgataaagccaggtataacgacacaagagattgatacgtttgttgaaatgtatttaaaaaagcatggtgccacatctgaacagaaaggttacaacgggtatccatatgcgatatgtgcatctgtaaacgatgaaatgtgtcatgcgtttccggccgatgttcctttaactgagggtaatattgtaacaattgacacggtagtaaacttaaatgggggtctttcagattctgcttggacgtatagagttggaaaagtttctgatgaagcagaaaagttgttgttagtagctgagaatgctttgtataaagggattgatcaggcggtaattggtaatcatgtaggagacattggctatgcaattgaaagttatgtaacaaatgaaggtttttctgtcgcaagagactttacgggacatgggattggtaaagagattcatgaagaaccagcaatttttcattttgggaaacaaggacaaggacctcagttacaagaaggaatggtaattacaattgaaccgattgtaaatataggtatgcgatattctaaagtagatttaaatgggtggactgtacgaacgatggacgggaaattatcagctcaatatgagcatacaattgcgattacaaaagatgggccaatcattttaacgaagttgtaattgggaatgaaagagtttgcaaaactcgaacgaaaatagtggtttttaaaaatttgtacgtgtttttttgataaatgcttttcaaagcataaaaagtacgttataatccttctataaaataaatagttagctacactcatataatcgcggggatatggcctgcaagtttctaccgaagtaccgtaaatactttgactatgagtgaggacgaatataattgcttgtttagcattctttttttgcgaaactccaaaagcgcgtctctcacttgtaacgagtggtggcggcttttggagtttttttattgcataagagggggaacaaacatgaaagtattacaagaaaagattttgaacgaaggaaaggttttatctggtgacgtattaaaggtagatgcttttttaaatcatcaaattgatccagtacttatgcaagaaatcggaaaagaatttgctaaacgttttaaagaagagaacattacaaaaatcgtgacgattgaatcttcaggcattgcaccagcagttatggctgcattagagcttggtgtaaaagtaatttttgcacgaaaacgtaaatcgttaacgttacaagataatatgtacgttgcaaacgtatattcatttacaaaacaagaaacaaatgaaatttcattatctcgaaatcatatcgatgaaaatgatcgtgtattaatcatcgatgactttttagcaaatggtcaggctgctttaggtttaatgagtttagtagagcaagccggagcgagtattgcaggaattggaattgttattgaaaaagcatttcaagatggaggaaagaagcttcgtgaacaaggcgttcgtgttgaatcactagcagaaattgcatcacttgataacggcacagttacatttgtacagcaagaaactgcggaggtgaaataaacgatgaagcagcatccatttaaaattgcatcgcttggtatgcagcatatgcttgcaatgtatgctggagcaattatcgttccgcttattgtgggcggtggacttggtttgaatcaaaaagagttaacatatttagtctcaattgatttattaatgtgcggcgttgcgacaattttacaagcattatcaaatcgctttttcggtattgggcttccagttgtgcttggttgtacatttacagcggttggaccaatgattgcaatcgggaaacaatacggcgtgtcttctatttatggagcaattattgctgccgggttattcgttgttatttttgcgaaattatttggaaagcttgtaaaactgtttccccctgttgtaacaggatctgtcgttacagtaattggagttacacttgttccagctgctattaatgatatggctggcggagtaggaagcaaagatttcggaagtcttgaaaacttagcgttagcatttggtgtgttactatttatcatcattatgtatcgtttcttcgacggatttattcgttcaatctctattttgctaggtttattgttcggtacaatcgttgcagcatttatggggaaagtaagcttgcaagcagttggagaagcagattggttccatggtattcagccattttacttcggtacaccaacatttgaattgacgccaattattacgatgattttagttgcttgcgtagggattgtagaagcaacgggtgtatattttgcattatctgatatttgcaataaaaaaatcggtgaaaaagaattaacaaaaggctatcgcgcagaaggattagcgatggtgttaggtggcattttcaacgcgttcccatatacaacatactctcaaaacgtaggacttgttcaattaactggagtaagaaatcgcgttattatttatacttgcggtggtatgttaatcgtacttggtttcattcctaaaatcgcagctattacaacaattatcccaaaatcagtactgggcggtgcgatgttagcgatgttcggtatggttatggcatatggtattaaaatgttaagtagcgttgattttggtaaacaagaaaacttattaatcgttgcatgttctgtcggaattgggcttggcgtaacagtcgttcctacattattttcacaacttccagaaagcattcgtattttaacagataacggaattgtacttggaagtgcgtcagcagtacttttaaatatcgtatttaatatggtgccgcagcgcaaagtgaaagtagaagaagagccagtatctatgcaaagtgcagtaagagaagcgtgaaaaagcaaggtctcgttatgagaccttgcttttctttttaagtggcattattttcccgtacgtaccaagacgccaaatgtactcaagtggcccgtattggtaatgtgaaagccaccagcggctaataaagatttgtaacgtgtagaaactaatgcagaatattggtccaacccataatggagcaggataataatttttaaggaatagaccaaatacaagtaatgtaacaattgtatgcgagatgtaatttgttaatgccattcgtccaacgtattggaatggacgtaataatgtttgccatttttctttttgtaataaacgcattagcgtgaaaatgtagaatatgaataacgtttttccgctaaacattgtaaagacctgcatataaattggttcataaaatggttttgataagaagtaacggaccatgaagaaccacattggtaatgttaaaaggaacataataatttgccattttttaagttttggatctaactctttcgtgcggcggaaaatatcctttttgccggcgtataaaccaagcaaaaatagcccaactgtttctggaagcataagtaaatttaatccaattccatcagcgtaaaatgcatggaaacgattttgtatttgtgacagccagtcttctaatggcatgataggtaaggaaaaacctagctcttcctttggtaccaatgcaaccgtaataccagccattagcataatgaattgaaaaatactcaataaaacgatagcccatattaaaatagtacgaggttctctcttataaaataaaaataagaaaaatccagcaatcgcataagtatgtaaaatgtcaccgtcccataaaagaacgtaatgtaagaaaccgaataataataaaataagtaagcggcgaacaaacaaagtttttgggcggtcggttttcgcctcagcacgactcataaaaatataaaaacctaatccgaataaaaacgaaaaaattgtataaaatttcgtttgaataaacatatcgtaaaataggcgaatatagctgtctatcccttcgtaaattcctgaaagatcacgtgagtcaaccccggcgataacaggccaattcacaagaaaaatacctagtacagctattcctctaataatatcgatggagtgtatcctctcgccatgtgtgagattttgcgtcatttttttcctccttgttaagtaattcccttttattatacaaaatgtaagatggaggggataggcgatatttccatttttttaaactgttaagttatgtaggataagatataataagagtgcacaataagttttaccctttttcaaaacaggcagtaaagctccttcttataaggagctttctttatgaaaagtgttgataatgattctctttaatgataaaatatatttaaaattgataatcattatcaaaaaaggttggtgcgtaagtatggtatatacattagtagcaggtacagtcgctgtatatgcagttattgcgaagtatgttttaaatggagtaggaacagcaaaatgagtgatatgacataaaatccctttcatttgtaaaaagaatgaaagggattttttatttttaatgagaatatgctgaaaatttagtatgatagtaaagtgaaactgtaatcaatgggtaggtgtaactctcactggttatgagctcgcaattagcgggaaaaagtatatacatcttggataaaggggaacaagggaatgacaaacatagtacagacaaacggtatgaaaaaacttgtttgtttttatgaagagtggcaaaaacacggcgatgcagagaatagtttaaagttgtttgaggtgattcaaaaatataaacaagaacagcttatgatagcgttctgtggtcacttctctgcggggaaatcaacgatgatgaatcatctatataaagcgcagctgttaccaacaagtccaattccgacaagcgctaacgttgtcaaaattgaaaaaggaatggatcgtgttgttgtaacggttaaatctggagaacagtacgagtatgacggtgcatattcagctgaagaattaaaacaaatttgtaaagatggtgatgaggtaattggtgttcacatttatcggaatgatgcgccaattcctgaaggtgttatgttagtagatacaccagggattgactcaacagatgatgcccatcaattagcgacagaatcaacgctacatctagcagacgtaattttttatatgatggattataatcacgtccaatcggaagtgaatttgcaatttgttaaagaattgaaacaacgtaataaaacggtttatctcgttgtcaatcaaatagataaacataaagaaaatgaattgtcgtttgagaattataaagatagtgtaaagcaatcgttctctaactgggatattgaagtagatgaagtatattatacgtcattacgaatgatgaaccatccacataatgaaattggaagcttagaaacgttaattacatctatcatgaaagaaaaagagcggtatgtaagagagggaatggagagagaaacagaatatttaatgggggaacatttctcgtttattctttctgaaaatgaaaaagctcttttgaaatatgagaaagagttagcatcaccgctttctatttcagagatagttgaaaagaaagcggagctaatggaaacgaaacgtcgcgaggctagtaaagagtctcatgtgagaaatgaatttataaaaggcctacaagctatattagataacgcgtatttaatgccatttgaaatgagagaattggcaaatgcgtacttagaaacgaaattaacaaagtttaaagtcggtttgctatttgcgaaaggaaagacggagcaagaaaaacaaaggcgtgtagaggcgttttattctgcccttcaaaagactgttgaaacgcagcttgattttcatgtgaaggaatttattgtagccttcttaaaagaagaaggattgttcacggaggaaattgggaaagacatatatgggttagaaattgctttcggaccagaaatgttggctgaggtaattaaacaaggcgcaggtttcacaggtgattacttacttctttatacagcggatgtagcgaatgaactaaagaagcgttattttataaaagcacagcaaatttttgataaaagtgcggtcgttttaaagcaaaaggtgagggaagcagttgctcgtattgaagaagagattgaaacatatacgatgttgcaaacggcgaaagaaacacaattacaatacaataacaatttggtggcatatgaagactatttacgaaatgtttggcacgatcatgttgctacgcctgaaggtttgcaaatagatgagatattgcaaagggaaaagcaaattgttagtgagaaatttacactacaagagcaggaaatcgtaaacgataacgtagcgattcatgaagaagagctgaaaggaacggcggctttaaatattcagcggatattagagaaagtgaaaaaagctgaaacgatattagagccattgccagcgctgaaacatgtacagcaagaggtaatagagaaaagaagacgtgtagaaacaaaacaatttacagtagcgttattcggggcatttagtgctggaaaatcatcatttgccaatgccttactcggtgagaaagtacttcctgtatcaccaaacccgacgacggcaacgattaatcaaattttgccggttacagaggaaaaaccacatggaacagtaattgttcagtttaaatcaaagcaagcgttattagaagatatgaaagctgtttataagctgtttcattatgagattgctacgttagatgaagcgttagcacaaattgataacgttatgaaatatccttcaccaactgggaagcaaaaaacaacatttagctttttacgagcggtacaaaaagggtatgatgcagtttctacttatttaggagaacaagtacaagttacattagaagagttctctgattatgtagcgaatgaagagaaatcatgcttcgttgagtatatggaactttattatgattgtgctttaacaaggcagggagtagcgcttgtagacacacctggagcggattctatcaatgctcgccatacggatgttgcattccagtatattaaaaacgcagatgctattttatttgtaacatattataaccatgtattctctcgtgctgaccgtgaatttttaattcagcttggtcgtgtaaaggatacttttgcccttgataaaatgttcttcttaattaatgcggcggatttagcagagtctgaagaagaacttgaaatggtaaaaggttatatcgcagatcagctactacaatacggtattagaaatccgcgtttatttgcaatttcaagtttatgtgcgcttgaagagaaacaaggaaagaatgttgaaaaagagaagtatggtattttacaaaactctgggattactaagtttgaggaatcatttacgtcctttatgatgagagatttaatgcttgtttctgtgcatgctctatatggtgcgttgcaaggggcagatcagcttttagtaaacatgataaagggtgcaaagcaggggaatgaagagaaagagaagcaaacgaaaaaatatgaagcagagcgtgatcaactacttcatatcatttcttcatatagtgtacttgctgaagaacaggcgatgcaaaatgaagtgaaagagttgctttattacgtgcaacagcgtctattcctccgctataatgatgtgtttactgaatttattaatccggcatcacttcgaacggatggaaatgtgaaaacacaattgcaacagtgtgttatggaattagtagcatttattcagcatgatttattacaagaaatgcgtgcgacatcattacgccttgaaaaatggatagacgaagcgatgaagcgtgcaaaggatgaaattgtagtgaactgtaaagtagaaaatgaatcaatttctatgaatggaacagtggagtatgaatacaaagatattacacataaagaaccgttcccttcagttgaaataaaagatttcaaaaaagcactggcacattttaaaaatgagaaaagcttttttgaaaagaatgacaaggcttttatgcaagaagacgctaaatctgtattagaaccgctcgtatcaaactatgtagctgatgaaaaacatttatttgttcatcattataagcaagagtgggatatgaagtggaatttattcgaaaaagtgatgcagcaagatgtgatgaactattatgaaagtatattgtttgcattggctgaaacgatcgatgtatctctatatgaacaaagtaaagaacaattgcaaaagcagttagtagagattgaaaaagaaatttatgttatatagtcgttatgagaaaaagattcgttcaattttcttttgaagtacagtatctaaagattttacaaatccagcaaattcatcggtagaaatcatatgagtaagaacgagtcgtctgccatctggtgtttcaccgcataagacgaatgaagaaaattcatatgttttgttttcaactactaattttggataggaatacgtgtcgcttttcttcttctttccatcaatagagatgacgttgcattttttctcattgttgtccatggtgaatccctcctttctattatttatggtagacaaggagggtttagaacaatagagaagggggaattttttatgtctgttgtaatagaacgtattccaaaagaggctataccgaaggctttattgttacttgctgatccaagtgaacggcaaatagctacgtatgtacaaagaggattaacatacgtagctaagcagggggggagcgttatcggtgtatatgttcttttggaaacaaggccaaagacgatggaaatcatgaatattgcggttgcagagcatttgcaaggaaaagggattgggaagaagctattaaggcatgctgtagaaactgctaaaggatatggtatgtcaaaacttgaagttggtacaggcaattctagtgtttcacaacttgctttatatcaaaaatgtggatttcgtattttttctattgattttgattacttttcgaagcattatgaagaagagattattgaaaatgggattgtatgtcgtgatatgatccggcttgcaatggaattgaataaaaacgtataactatttagggggaagagaagatggaagtacataaagcaattacagcacattctcgtaaacaaaatgaaagtgtaaaagcatgtttacaattagatgcacagcgtgaagcagctattgaagctgccgtatctcttgcgtcaaatgggaaagaattttcggttgatgtcattaatgttgtaacgaagcagattaatgatcttgcaaaaaatggtgttaccttgcagcgtaaatatgttacagaagaaatggttatggaatatgtaagtcgtttgaaagagaaagaaggtcgttaaagatgatagttacagtcgaatggttacgtgagcatatagaagatgagaatgtccgtataatcgattgtcgttttgatttagcgaatcctaattggggtagagaaaagtatgaagaaggacatattcctcatgcgttatattttgatttgaatttagatttatcaagtcctatagcagaacatggtggccgccatcctttaccaaatattgaggagtttgcagacaagctttcgaaggctggtattgatgaacatacgacagtaattgcgtatgacagtcaagccggtgcaaatgctgctcgtttatggtggttatgtaactatgtaggacatgagaaagtatatatattagatggtggtttccaggcttggaaagagaatggactaccgacaacagcggaaattcctgttgctatacgaaaaacattcaaagctaatatacaagatcatatgcttgtaacgatggaaacggtcagagagaatatccgtgcaggtgcggatgttacattaattgattcaagagagcccaaacgttatgctggtgtagaggaacttgtcgatcataaagcaggacatattccaacagcggtaaaccatttttggaaggatggaatgttgcaatcaggacaatttaagaataaagctgggcaacaagaacgattccaaaatctgtcgaaagataaggaaaccattgtatattgtggttctggtgttacggcatgtccaaatatcgtcgcattaaaattggctggattccaaaatgttaaattgtatgcaggtagctggagtgattggatctcttatccagaaaatcaaattgcaaaagaagaagattaatcacttgcatgcaaaaataatttgtattaaaataaggtcacaagcaagagattgctcgaaaaactttgtattttacacattggaaacaatgtgataatataacgacaagtaaataatacatcctgcggtgtgcgtaacttatttatgtctaaaaccgatgttagttatacggaagctcaatatttagcgaccatcatcaagccttccttgtggaggaagatgtacggtaactgtgagggcatccacctgcgagtagcgggtttttggacatttacgaggagcggcacgtgcgggggtcttatttcaactaaccttatataaaattcctacggtgtacgtagcttatgcatgtcttaaaccaataagtttaatatggaagttcaatatttaaatgtagctaacatgccatctttttaagaaggaagttacaaacatttgtgagggcatccacctgtgagagcaggtttatggacatctagagagaacggcatatgtggggctatataaaaaccttacgttttatacgtaaggtttttttgttgcatagatatattaatattatcttgattcacctgtgaagtttccgtaataaatgtagcactttctgtcttcatcagtctctcttgaatccaaggagaattccatagaaatgccgtctcgctgaatatatataatatctgaatgaagagatggtaaaatttcttcgtagttccatacatcttgactatctactaagcttgaacttgtttcacttagttctctaatttcaaaaccgatgtgggagtatgtagggtctgaagggtcattggcgaaaacttctttttgaatataaataactgctgttccgtctgggtcaaccgaagttgcagtaacaacataagtatttttctctttaataaaatattcacaagtcatgcgtgcgataatttcagaattagaaatattggcgtagttccataaagcaggataccctttcgtttcatcattaagtcgatattctaagcgcattttatacctcttcttcctttttcttctactttatcatgccatcctatataataggaatagaatttaaaaaggggagtgcgaaggtgacaaaaacgaaatggctagtaggtggtgtcgtaacgtctttaatgactggcactttatttggttgcgcacaagatcttcccccaaaaccgaatgataatagttgttctgattgggattgggatgatgaacttggggtatggcagtgtgatgatagtagttcaggttatcgtgggcattatttctatggtgggcgatactatcaaaataaatccacttttaaaaattcatcggcgtttaaatcgtatcaatcgtctactgaatttaaaggtggaattggaagcggttcaaagggaggatttgggggctaaaatatgtcgcaatacataagggatcgaaaagaattttatttaaaatatccgaatttttggtcggatttatatgaatgtgagtatagtttgtttcatgttttttctataacaaatcagactttggaccaattacacttagcgactgaacgaatgggcaaaatattttttaagactgctagactgctgcgtaatctaagtgacgaacagcttctagatcttggctttccatccccgagtttatcattcattagaatgaaagggctttatcctgaatctgtaatttcgcgatttgattttgctgtaacagaggataacaaaatcaaaatgcttgagtttaatagtgatacaccaacttttattgtggaatgttttcaaatgaatgggaaagtatgtgaaaatctaggctatgatgatccaaactcggatcaagaacgattgctatcttctggtctaacgaaagcagtaatggaagcgacaaagggattagataatccaaatgttgtttttacagcacatcatgaacatatcgaggattggaataccactatgtatttaagtcagctatgccatgttgaaaataaagtagtgccaatgtcagaacttagaattacaaaagatgctctagttgataaagatggggcgaagattgatgttttatatcgccaaacatatccgatagaagatttaattgaggatcaagatcctgaaacaggagatttggtaggtgtggaactgctgcaacttgtaaaagccggaaagctttttataataaatcctttgtcagcatttttacttcagccaaaatcaattcagtgtcttatttgggggttagcagaagaagaggtcttttatacaaacgaggaacaacagtggattaaagaatatatgttacctacatatttagaaccagatttatttttaggaaaaggttctttcgttcaaaaaccttcatttggtagagaaggagatacaattacgattcgcgataaggatgaaaatattatgcttcaaaatgcacatcaaacgtataaaactgcactgccgatatttcaaaagtatacagaactgccagtcgtatccttggaaacagaaaaagggatggagaaactgtcctatgtgtttggttcttttttaattgctggaaaagcgagtagtatcggtattcgcgcgggagaaaagattacaggaaatgaatcgtactatttaccggtaggtataaaaaggagggggaaaaatgattaattttttattatatttagcagtaacacttggacttttatgtattggtctgttcttgatggaagtgacaacgaaagttaaggaatttaagttaatggctcaaggtaataaggcggtaagctatgtgcttggagggcgattacttgggttagctatcgttttatattcgacagcagctaattcaatttcacttcttgatatgatttcgtggggagcagttgggattttggctcaaattatcgtcttttatttagctgagtggcttacaccacgctttaatataaacaaaagtctcgaagaagataatcaagcagtcggtctttttcttatgtttttatcgctttcaattgggattgtaatcgctggttgtataacttattaaaaactttacgtttaaacgtaaagttttttattttatcccgctatttgccgggcagcccgattggtgagggctaataatcagtggcggatgaacaaaacccccactgattaaagtttcactttatatacgttagtttgccataccatttgaaaaaattgtaggctacggttgacatctattttaaataagagtaacattttcaatgtaatgaaaataagtctctgttaggtgaggctcctgtatagagaaatgctactgcccaaaaatgtcgagagacgccaatgggtcaacaggaatgatcgaattaaggtttttcttaacgtagctggtaatgtacctatgctatacagtgctaaaactcggtgagggagaggtccgtagatttctaattatattagaaatcgtttatttgtgtatgtaatggccgctactctcttaagggtaggggtcttttttgttaccaagctatgagtaatttcatattataaactataaaattaaacgaggaggtgaggagcatgtcaaattctgactcggttccgttacccatatacttcaaatcaaaaatatatgatgtaggcaggaaacgatttgttcctccctctatatttatcacaatatagcgtttataaagcgcgagacactttcacagtaaagtggataaattgagaaacaaagcgtttcttcctatgttgtaaaggaggagacgataatatgttatatgcaaacaaaactgtgggtaacacgtcatataaactaagtaaaaaatcaataaaagaacaaacaatgctccaaaaaaataaagatttattaattgaaattgcaacaagagatgtaaaatctgtatttgcatattttaaaacaacaagagacggactatcaatgaaagaggcacaaaaacgtattcaagtatatggccgaaatgaactaacttcaaaaagagcacttcttgcagaagtaatgatgaagctaggtggcatgattccaggtttttcaaaacaacgtgtgtgtgatgaattacaacgtgaaacgattactgtatctagagtagaatgttctagtagtacagggctaaatagtgaactgaaaatgatggagatacctgtgcaagaacttgtacctggagatatgatttttctttcggctggagatgctgtgccagctgatgtacgtattatttatgcagatgatttattagtgaatgagtctgtgttaacgggaaacgaagcgaatatagagaagtttgagagctgctatcaccttgaacgtaaacggtttattccattaaaacggatgaaagattataatccacttgagcttgaaaatgtatgttttaaaggttcgcatattgttagtggaaatgcaaaagctatcgttgtttctactggaaaaaatacgtattcaggcatcttgcatacttgttgtagtagaacgtcttaatgtgttaatgatgctaaatatacaaaaacaatgtataatagacaaagttgagcaaaaacgtagaatggtaatctatttatataaccttacgtgataacgtaaggttattatttttttaataggagaggaattatgaaaaaagtattattagttgatggtatggcactattatttcgtgctttttacgcaacaagtgtctacggacaatttatgaaacgacaagatggaacccctacgaacgggattcatggttatatgaaacacttattaacagctacgcaagcgatcgaaccaacacatatcgttacatgctgggatatgggaagtacgacatttagaacagaatcgttctcgaattataaagcaaatcgtgcagcgccaccagaagaattaattcctcaatttgatttagtgcaagaaatgactgcaaaattatccattccagttatcggtatgaaaggctacgaagccgatgattgtatcggtacgcttgcaaaacaatattgcaatgaagctgaagtttatattttaacaggtgatacggatttacttcaacttgttgataagagcgttacagtcatgcttctgcgtaaaggaattggaaattacgaatattacacaccggagaaaatcatggaagaaaaaggtgtagagccgtggcaaatcgtccacgcaaaagctttcatgggagatacaagtgataattatccaggggtaaaaggtatcggtgaaaaaacagcgtataagcttattcaagagcacggaacagtatccgctgtactagaaaatgtagaatcattaacaaaagcgcagcgtacgaagattgaaagtgatttagagaacttaaatatttcgttacaattagcccaaattcactgtgaagttccaatttcatgttcactagaagaaggattacacacaatggatgaagaaaaacttagatttgtttgtgaagaaatgaattggggaagacctgaaatattaataaatatgctataaatagtttgggaagagggatgttgcataagtcgaactttgacttggtgacaccttctttttgtttttgtaaacagtattataataaataaaattatgtcgaactcaattttaaatatataaatatttcgacaagatataatgataaaagttgatgaaaataataacttttatcatgaagtgaattaatttcaacatagttttagataatcattttttcgtgttcacaaagttgtcagaaaataaacgagattttcatatgaagttcaaatagaattcacaacaatcaattattataagaacacacagataattctttatcttttatataaaccatcccccaaggaggacaatgaaaatgagaaaaaaagtgagaaaatcttttaaacaattattaattgaaaataaacaatcactattaaataataaagaaaatatgaaagaaattgaagagagaattgagaaacgacatgtagcatatagtggtgccagtaattaaataaaataaaaaagatagcctatgtaggctatcttttttattttatattgaaaaaacgctattcagctctttaattttgtaaatatgcaagatatttttatagcgtttttctatcaatattactcatttttcgaggttgaaattggtatataccaatttttgagattttctattcaaaatattacaaaaaatgttacaatacactcaaatttatactataaaatcattttaatatgaaaaattggaatgaaaagaaaggagaggaatatgaataaagatgtcgctttgaaatgattattatcatttcattaggagttgatgtaaaaagatgaaaagatacgaagaattggactctataagagggatttcttcattagtagtaatgattggtcatcatttaatgattttttcagcatttcaaaattacagttatgaagataataaaccatttgttgtgtatctattaaaagaaacgcctgctcgtctaatttttagtagtggtaacgaatcagttattatcttttttgttttgagcggatttgttttgtatgaatctattcaaaaaaactatagtagctatgggtcataccttttaaaacgtatatgcagaatatatattccttatattgtggcaataattatagctattgtatgccagattacaattagtgaatatggtatttcttatttaagtgaatggtttaatcgctcatggacgattgaaagttcttcaagcttaatcgcacaacatattttattggttgggaaatataatacagatgcatataacggtgtgatttggtcacttgtccatgaaatgcgaatatcaataattttcccgttaattttgatgatttgcttacgaaaaacgttaaggtgttcattactattattgtttagttttagtatatgttctgtcgtaatattatttttgtttcgctcgggcttaacattaacaagctatgcattaacattgcattacacagtactgtttttactaggagcactagttgcgaagtataaaaataatttaatagttttttatagtaattgtactaaaaacacgaaaattgcatggtttttatttgcgattttactttttatgtatgaagggcttataggagaaattaaagtgctcaataattttatatttcgagactacgtagtggcgataagtgcatgtttatttgtcatattaagtttgtcaatatcaactttgtcgtccttgctacataataaatatttgttatatttggggaagatttcttacagtctttatttataccatattatatcgttgttttcccttatatacatgctccatgaaatattaccgttgcctattattttaattttttcacttgttttttcgtttatacttgcaatgctttcgtatgtatatgtagaaaaatttgcattcggagtcggaaagtatgtaacaaaacaagtggatagaagagagaaagggttatctgtaaagagtgaattgcaggatgttattcagaaaagggcggtgaaataattgaagcaagaaatgagtataaaagattttcaacaattactgaaaagaagattcgtaacgattattttaacgatgtgttgtttaaccgcttctttagttcttatctctatgtatgttttaaagccgtcatatcaatattcaacgcaaattcttgttgggaatttagatgagtttaataaggaaaattcaacaaataaaacacaagaaaataagcaactagtaacatcgtatgttgatattttaaaaagcccattaattatttcaacagtcaaaaaaactttgaaattagagcaatcaagttatgaattagcacaaaaaatctcggttgtgaatacggacaactcacaaattgtaactgttacagtaaaaggttccaatccgaaaatcgtgaaagacattgtaaagacattggcagagcaatcacaaaaaagctttcaacagtacacaaatgtacaaggggtgaaagtattaactgatcctgagttacaggaacaggctgaaaaattgtttccgaaatttcaactgatcattcctatttctttaattgttagtttttttgttgggataggtttagctgtatttcgagattattttgatgaacgtatatacacggaacaggatttagagaaaataacaacagtctctgttattggtcacataaatatggaaccaaatagaaaaaagaaacctacagaggttgataaaaaatcatctatatatcgaggtgaacatgtcgatgtttaggacaaagaagcagctgccattcaatttgcatgatgatctgatgaaagagcagttttatacggtgtatcacgagctgaaaaaatccggaaaacaactgttcacagttagttcaacgaaggacagaggtgttgttgcctcgcttatagtaaatatgggtctagtgtttgcggaaatgaaaaaaaaggtgttacttattgatgtgaatttttctgatcctaaactacatgtattattacaaagtgatcacatgataacagtaaacgatataataagctcttcctcctgcaattatgaatctttttctagtaatttgtctaattacttatattgtattcctgcaaaaaaaacagtacatacagggacgcctttagttgctatggatgaatttgataatgcgattgctaagtggaaagaagattttgattacattttcgtttattcttctgaagtatttgagcttcctgctacgcacattattgcagggaaatgcgatggagtggttttagcagttaaaaagcgaaaagattcactacgtacagtgcaaaaagtaatagcggatataaataggaaagaatgtgaattaataggtataattttatattcttgaatgtgggggtaacgatccatgattcgtgaaacaaatcaagccaagttgtatacgattccggctcaagaaaagcctagcatattgaatcgaagtgtaaaacgcttgtttgatattatattttcaatcatattgttactattaacaataccaattatgttgttcttttgtattatgattaccttagaaacatcaggggctccaatatactttcaagaacgtttaggtataaacgggaagaagtttaatgtatttaaattaaggtcgatggtaaaggatgctgaaatgaacggaccacaatgggcaaaagaacatgatcaaagaattacaaaagttggattgtttataagaaaaacgagaattgatgaattaccacagctcttaaacattttaagaggagatatgtcttttgtaggccctagaccagagagagagtttttttataatgagtttgatgcgtatattccagaatttaaggaacgtttaatagtaaaaccaggattaacaggatgggcacaaataaatggagggtataatcttgatccaaaggaaaagttgaggctggacatggagtatattgaaatgaaaacatttcggacggacatccgtattttatgtaaaaccgttttaattgtattgaacggtaatggtgcaagataaatatatatgtaaacaaacaacatatgtaagtaggttacttgcaaaggagaacttgtatgggtagatctattctaagcaatattatccatctattttatagtacgattttagctaaccttcttcaggccgtcagtttaattgttttagcaaacttttttaacgcacaacattatgggatgtttagtgttgccatagcagtgacgtttgttatgttattttttacagacttaggacttagtaatacgtttcttcgagaaggggcaaaggatggagcagatttagagcagattttatcatcgtatataaaaataaggatgattctacttatttttatttctatcatcggttatattgctattcattatatgtatgcggataaaaatttaatttatatgatgataaacgtaatgtttttcatgttaataggattaacttggcaaaacatagggattgcctattttcaactgacggaacgtatgaagtatatagcgctcataaaagttgtatcagcatcagttgtcattataattacatgtttttgtattttcggagagttaccggtgtatgtaacagctcgcttatatgcttttgggtatatgattggtggtttattcagtatatatatcatgagaagaaagacgaaaatgaatatgaaagtcgtaattcataaagcgttattttggcaattaactccctttattattagcggttttttaataatgagtacgccacaattagcgcctatcttgcttaactatacattgccattaagtatggtaggtgtttttgcagtggcgtaccggatgccggcagctttatatcaagtaccaggggtaattgcaggtgcattttttccggtgctctttaagcattataaccagaataatatagaagagcatacgaaattaaatttacttcaaattaaatcaatggcgattgtaggaatatgtatgacgatcggtttatatcatttagcaccatactttatttctatattttttcatgaagaatggaggaatgcagtagaaccactccaaatattatcatttcttattgtgctacaaagtttaaatattgccattgctgacggtttaacgacgagtggttgtcaaaataagaggactgttgtgcagtgtgtagcattggtgataggtggggttatgctttatagctttagtagtcttggtggagtgataggagcggcatacgctatggttttatttgaaatagtcgctttagtgggatatatagcggtaagtgtagtgaagaaaaaaattgtattccaaattgtaataccgtatacaatttattttggtgtaacctttattggagtgcaatatatattgcatacatatcatttaattgcgcttgttcttaatatactaattgtagtagctgccatattcctatatgattatgagctaaaaaaacttcttctttcttttataagaaaaatacgcaaaaaggattatattacgaaacaggggatatagcctatggaaaataatatgaaagtatcaatgggatggattattcttctaatattatttgtcatgttaagtaaatacaatttatatattggattttcattgaagatatatatgatttttttagtcatatatttttgtttaacaattaaagactttcatattcaaaagttatattttcatgaagttatatttttactgttttatttcatttattgtttaagcggaattctttctatgtatttaaatgctagtattcgtatgatttttggcgtgctactcgttttaggatgctattttataatgagaaatttattggggaatactgaaatagtggtacttgaatcatctattgcttatgtaggaatagtatttaatgttgtaagtctactactctatataatcggtttacaatactttagtttatacggtggagaagagagagaaatttttgctggattattagttgatagaggatatccacggttaattggattgctagatgatcctaacatttttattttctataatacaatattttttatgtactatatgacgaatttgcaaaatatcacaaacatcttagggttaattttatgtgttacgacgagtctattaaccttttcaagagggggaatattagcgcttgtgcttgtcatttttgtatatatatgtatgtctagtttcgctaaaaaaataaaaataattatgagtttagtattgtttagtgtagttatttttagtttatcgaatagtgtaatggggggccaattagatgacatattaaataaacgaatttctgatttttcccatgataatggaagtggtagatttacattatgggaagctgcttttaaatattatttatccaatccatatatcggaattggtgcgtttaacttctcgaattattatgagtatcaatttaatgaaaaattatatgtacacaatacatttttagaaattttgtctgagtcgggtacaattggttttcttctatatagtgcgtttttattcatattaatgtttaagttagcgcagcatactttgtttcgtgaaaaaccataccttctattgactatgattgcatttttatttcagatgatgtcattgtcactcattattaacgaagcgttctttttatttttagcagttgttgtgaagtatatttcaatatatgaaggaaggggaaagatagatggtaaaatgtctatcagcacataataaggcgcctcatgtttctgtaataacaccttcttataatagtagacgatttataggtgagacaattttatctgtacagaatcaatcgtatgaaaactgggaaatgattatcgttgatgactgttcaaccgaccaatctgccgtaaaaattaaagagataatagaaggagactcacgtattaggttattatcattaaaagaaaatgttggtgctgctaaagctcggaatttagcgattcgagaggcgagaggaaggtacattgcctttttagatagtgatgatatatggttgccgcataaattgaagacacaattgttatttatggaagaaatgaatattgctttttcatatgcgtcgtatagtttaattgatgaaaatggtaatgaattaaatcgcgaagtgagtgtaccaaaatctgttgactatcattatttagtaggaaatacaattatcgggtgtttaacggtgatgattgatcgtgaaaaaattccgtatgtcgaaatgcctagtgtacagccggaagatacagcgttatggctgaacttattacatgaagggcatgaagcaaaagggatacagcaagtattagcgaagtatcgaattgtagcaaattctgtttcgagaaataaagttagagcagcttttcggtattggaaattattaagggaccaaaaaagtcttaatgcagtgcaaagcttttactattttagtaagtatgcttatcatgcttataaaaaaaataaaatcaatgtagttgggaagacgcaattatgaatatactgttgatgactgataaattgataactggcggagccgaaaattatttctgtaaattagaaaataatttgcattatgaggattttaagatttatacagctgcaggtgatggagaactatatgaatcccttactagaaaagaaaattttatcttacttagtcgatggaatcatttgagaaatatttattatttacgaaacgaaatttgtaaacgaaagatagaacttattcatgcaaatagtttgcgaatggtattatatgcttttctacttcaaaagtttattaaaaaaaagatgaaaattgtttatacgaaacacaatgtaacgatattagaaaagaaaatgccaacgctttttcggtatttcatgaataaatatgtgaacaatattattacagtaagtgagtttgaaaagaacaatttaatttcaattcatgtagcagaagaaaaaataaatacaatttataacggtgttgatattgaaaagtttttattccagcagaaaaagaaagaatctacatataaaatagggatattagctagattatccaaagagaaaaaccatcaactatttgtcaaaattgcaaatgtgttgaaaaagagaaatgattttatgttttatattgctggtgatggaccagagaaagaatcgattatgaaagaaatagaaaaatatggattgcagcaaagggtgaagatgctagggaatatttcagagccgcatgagtttatagggaatatggacgccttacttttattatcttttcgtgaagtgtttccaatggtagtaattgaagcgatggctacagggacaccaattgtttcaatagatgttggtggaatacatgaagcggtaatagatggagagtcaggtgttttgatatctgaatattgcgaatcagaattcgcaagtgcgcttgaggaactacaagggaatgaagaaaaggtaactgctattagattgaaagcacgagagaaagcaatgagatatttctcgttaactaaaatgatagaggaaacgaaaaatatatatgaattaaacaaatgaccgagtaggtcgtttgtttttttttattatagaaacttttaagagacaactcacatattatatgaaaaaggtaatatgaggagtgaatttattttgtcagaatatatttcatcccaagaagattgtgcgccagaaagtagcgttcatattgattgttttggcgcagttccaaactcgggaaatgatagctcattagcaattcagcaagctattgattattgtgtagcgaatcgaatttcgacggttagaattacagggataaatacgtacaaaattgtaaagccgattgttattaaatcaaacgtaagattagagttggatcctaccgtaacactgcaaattgatggggattttaatgcatttgagctacaaagtaacgcttcgatagttggtggtactcttcaagttataaatccattgtttcaatctgctgttatttatgtttctggttcacaacaaatcgaagtacctaatcaatctgttatatcaaatataaatataataaatacaactccatcgtataaaggaaaagctatacatttttattgtcaaaaggcatgggattttattagtttctttcaagttaaatttattcaaattaaaaactttcaaactgcaatacatttgaagacagaatatataaatgatatcaatacaccttgctggattaacgccaatgtatttcaatctatatttattgatggatgtgtgtatgggattgaagtagatggaaatagtgatttgccaaatgaaagttcaggaaatacgtttcatgatattcaagtgcaatgtagacaacaaacggaaaaagtaattcgttgttcaggtgcgtataatacatttgattgtatgatctgggatacgtaccggatgagtagtgaacaaattgttattgaattttcttccaattctcatcgtaactaccttttttcaaatctgctttcgacaactattgtagataaaggacaatacaatgtttgtaagtctacttatgaagaatccctacgaattcagttacctttgacgttaaatagacctcatttaataggaaatcaagatgatattttagtaaatgctcagcagaaatataacgttaagcaagtaagtggaaaagtgccgtacgggggaaatctcacaaattgctttaatttaatagatgaacaaagtgtaaactatattgacgttccagatagtaatccagttgtaattgaaatggattttacgaaaaaaccaatacaaatgttaaattgttttggaatgtattttggatggggagagagcccaaagaaaattaaaattgaatatgcattaagtgcaactggaagttgggttatcgcgttggatgttccattaaatgttggcgatacaattatatcgaatatgaaggccagtcagttatataaagttagaattacattaagtggttattctcaagatcataaacgttttcgaattaatcgtatctttgcaagatcttctatggaaaatgggagtgcttggttagcgacgactggcggaagaatgtttggagatattgaaatagaggcaagtaaaggtataatcatgaagactgctagtggagtgaaatggaaagttactattaatgaagctggccaacttattacgactaaaataacttgagatggtgtttaatcgtatatccttggacgagttacaacgtagtgggatataggtaatgaaaaagagattgtaatttggtttcaaccaaactacaatctcttttttgtttcaattacttccaccaaatccaagtccaaaggtaatttcgtacatttcgaggagtaatgcgaatgaagcgttcaccgtcaaagaagcaatttaaatttggaagtgcttcatctggattttctggaacaaaggtgacgatgttttcgttacttgtaacggttactgtaattggttggtcggtaggcgagacttgaagttgtaacgaaatattggccgtatttttaaagggattattaacaggggggcttatcacttgtactgtgaataacacgataattgtttcgtttggttccaaattagtagcgactaggaaaccgatattcggattcgctagtggagagcgttcaccgttaataaagacagtgccatttataaattgtaaacctgctggaatagtatcttgtaacgaaatatttgagagtgaaatttcagaagtatttgtaatgcgtaccgtgtaatcaaaatattgatttaaataagctgagctgacggaagcatttttcgtgactgttgcagttataaattgaactggtatacgaacgatatttgaattaacaatgaaagtaataattggatcctgtggtgtcaactgaaaagcagcggtaactgttgcagaatttataattgtactgtttgaaagaatagaagttgcgagaacttgaaatgttatagttgctactgtacctgcagataaagaaccaatattaataccagtgtctggacgaacatttggaacgggagtgccgttaatggttacgctgttttctataaatgttgtaccagctggaattgtgtctataacagaagtactgattgtaggaattggggaatgattgaataccgctaatgtgaatgtaatgatatctcctataacgacaatagatttgtcagctgttttttcaatgcgaaccatcggatcaataactgtcgttgtaacggtatttgtttgttttgtaattgtaataggtggttttgttggatcaatgataacggtataggaaacagaagcatcattattaattgtagattgaagagtagaagaagatattgtcacttggaacgtaataataacaaattcattaggagcaagatttcctaacgtaataccattttcaggattctcattaggctgattgattccgttaatcgtaacactaccagcaacaaaagtcgtatctattggtacggcgtctatggcaagaaggtcttcaatcgtcacattaccgctattcgtaatcgtaattgtatatgttaaagtttgaccaggtaaggcgtttgttacatcagcagacttaaaagcaatgacattatcattttggacagtagttttgacagtatttgttgtagtcgtatttgtaacaggtacgttatttgggttgactatatagttaaaagtagtaattgcgttgttgtttagttcatttggtgttggaatagaagtcacagttacttggaatgaaacgatagcatctccaccaatagttatagtaccaattggtatgccgcttactggattcactcctggaagagtttctccgtttacaatgacgctattttctataaacgtagtaccttgaggaataatatcttgaatgattacatcatttactgcaacattaccggtttgatttagtgtaatcgtatacgttaacgtatcaccaaccgttgcaaatgcaaggtcaacagctttattactattcaaattcgcatgattaatttctgttaaagcagctgatgaaataatagtttcggtaataggtggtcgatttggtaccgtgtattcatattcaattgtactcgtgttagagattggatttgtttgtggaatcgaagtaacccgtacttggaatagaatggttgctgtcgtattaggcggaatgttatcaatttgtataccgttaagtggattgtcatttggccgagcgttgccattcacgataacactattctctataaagctcgtatttgctgggatgatatctgtaacaataatgttttctacttgtatattcccattgtttgtaatggaaatagtgtaagggataatagtttgtaggtcagcatattggataggtgttgtttttgtcgcaattacattagcagaaataacttcagtgaaggtaatattgctagtggatatttgttcttccacgtttattgtataacgagaagttgattgattttgaacatggccgctagcaggaagagctacgacggtaacagaaaatgtgactgggatagaaatattaggagcaatcgttcctacaagtatacctgcacttgggttggcattaagctgaggaatgttatttactaaaacgctaccgtcaataaaggttgttccattaggaatattgtctgtaaatacaacagcagtggcatccgtattccctgtattcgttaaagttgttgtataagttaaaatgtcaccaatcgttacagaggttaaatcaacagttttaagtgaaacgatgtcagcatcattaatttgaacaaaagtagtattggaagtagtagatttttgaattggtgcaaagtcaggattgaaaataaagtcgtagacgacgtttgcagtattaggtgttggatttacagcaggtaaattcgtaacggaaacttggaatgttattgtagccatttgacctgctgcgacattaggaatggaaaagccgatattcggatctgctgcaggaagtacagtattattaactactacacttcctggaataaatactgttccatccgctatagtatctgtaaaaaagatggagttagttgtagccgatccattattttgaatgaatactgtatattcaatggtttcatcaatgttagctaatacagtattagtggactttgtagtaataagaatagcatcaataaattgtatgtttgtagcattggaagaggtcgtttctgaaattggtggtgtgcttgggtctggtcgatactcatagtgaatgacggcgatattattaatgttattttgtggcggtatagagactacgcttacttggaacgtaacaataatcgtattatttggaagaattatatcaagattgatacctgtaattggattttcgttaagtcttggtacgccatctacaagaatgctatttggaacgaatgtggtgccagaagcaattgcgtcaagtaggagagtatttgtaataggtattgtaccagcgtttgtaactgcgactgtatatgtgatgatttgaccgatacgtgtaatggatctgttagcggatttaattgcactaacatttgccgtccgcacttcagtatttactgcatttgataacgatctacgctgaataatttgagaactagggtcaatttggtattcgtacgaggtgtctgaaatattaatgactacattgccaactggtatatttgtaagttgtacttggaatgaaatagtgactgtttcatttggttgtatcgtgccgagagttactccgttttcaggattagcgccaggctgaattacattatttattgctaagctatcttcaataaatatagtaccttctggaatgttatcaatgaacacggtattgttagctggaacggttcctatattttgtagtgtatttgtgtaggtaataatttgcccgattgatgcgaaagttatatccgcgcttttaacagaaataatatttgcgttttgaagtgatgttgtaacaatgttagaatttgcagagcgattcactggtggggctgtagggatacttacatattggtaagttgctgaagattgatttacaatttcggtttcagtaggtggattatttgtttgcacttgaaatagtatcgttttggaactgttagctggaattgttccaatcggtattccgttttcaggatttacacctggctgaaggacaccgttaattgtgacactatcgggaacgaatgtagtcccagctgggatagaatctgtgaaaacaatatttattgcgtcaacattaccgatatttttcacttcagaaatataaagtatagttccgccaatatctacagttgttggattggatgtttttgtaattgtcaattgtgcttgcacgaaatttgtaatgacgatattactagtagatgtttcagtaataggcggttgccctgggtctggttggattgtatatgttgtattggattgatttgtaatcgattctcgcgagaatgaatctttaataagaatttggaacgaaataaggtgagtagcgtttgctgctaaggtaggtaaagtaacacctacatttggattggcaccaagtatagctgttccattaagtgtaaaactattttctacgaatgtagtatcttggggaatcgtatctgaaaatatgagattcgtagctggaatatttccggtattttctagtgttattgtgtaagtcaaaatatcacctgttgttgtttgaggtgcattgactgcttttaaagaaaggatagttgcatccgaaatttgtgtgaaagcgggattagacgtaattgttcgagagatgataggagcagttggatcggcgataaaagtatagtcaatacgggctgtattagaaaattgggttcacgcttggtatagattgaacgataacctggaatgttacagtgacgatttctgacggtgtgatggagtttaatggtattcctacgttaggatcggcacctggaacagaaacaccactaatggtaacgctattcggaataaatgcagttccttctgggaccaaatctgttaaagtaactgtatttgcagtagtatttccgttattttgaacgactactgtgtaagtgattgtaccgtcagtagattgtacgagagaatctgtacttttaattacggataacgatgcatcaacaacagctgtattaaccgtattagacgaggatgttgctgtaacaggaggttgacttggatcgacaatatacgtgtaacttgtaagtgcttgatttataatcgctccttgcggtggaatagaacttgcaagaaattggaacgtaatagtagcggaatcacctggtgcgataataccaactggaataccgagagttggacttgcatctggaagtgaaatcccgttgagcgtaacactatttggaacaaataatgctccttcaggaactccgttaatgagtaatatagagtttgcagggaagtttccagtattcgttaatgttgctgtatacgtaattacatccccgatagatacaattgaacgatttgcttgtaaaacagttgtaacagtcgcgttattaatttgtgttgaagcgctattagaatttatcgtgcctgtaacaggaggagaggccggatcaacgatgaatgcgtattgaatagatgctacgtttgtaatcggatttgaaggtggagtagatgtaactatgacttggaaagtaacggttaaggaactacctgcgctaactgttccgatattcactccgttatttggatttgcgcctggaatggtacttccatttacagcaaaactattttcaacaaaggtcgttccagttggaactgggtctgagaaatttacattcgtagcgtttgtattgccgttattttgaatcgaaactgtataagtgatcgtatctccaatatttgcaaaggctgtattagcagtttttacagctgaaagtatggctgtattaatagaagtaacgaagacattcgtttccacattgccaggctgagccagtaatgcattgcctacgttatattggaagttaacaaatcctaagttttggagttcaggtgtgaacgttgttggattacttacgatttgtacttggaatatgattgtaacagtttgatttggactgattgtatttatgccaacaccgttaataatcgaagcggatggtaatggagtgccatcaacaataactgatcctgcaacaaattgtgtccacgatggtaaagggtctgagaatatagcgttgttagcaggaatattgcctgtgttcgtaatagtcgttgtatacgtaatcgtatcaccaatcgttgcaaaagttttatctcctattttaatagtatttaaaatagcactttcaatttttgttgtaacgttgttagaaataatattttttgaaactggaggattagctggattaacgatatgttgaaagctaacgctagcttgattagtaattggatttataggcggaatttcattggcgataatgtgaaatgctacgatgacagattcgtttggcgcgatatcaccgattggaacgcctgtaatgatatctgcatttgggatgctagttccgttcagtgtaaagctattcggttcaaaggaagttccgtctggaataaggtcggtaaaaataacattcgttgcactcacatttccgttatttgtaattgtaacggtgtaggtaatatcctgcccgatatctaccgtagatacatttgaatttttttgtgcagtaaggatagcgctattaatttgtgttgtcgttgtattagattgattggaagttgtaataggtggctggctaggatcaacgacataatgatatgtggtagaagcagagttagaaatgggattaagtgttggaagtgtaataacagttgcttggaatgtaacgattgccgtattaccaccattaatggaaccaatatttacaccagttgataaatcggcgtttggaatggtttgcccattagctgtgaaactatttggaacgaaacttaaattgctatcaagaatatcgataatagttacatcagttgcggtcacattcccggtattaggaaggttaagtgtaaatgttattgtattaccaacatccgcaaaagtaagatttgctgttttggtgctaataatagttgcgttgtttatttgaaggagtgtagtgttggaagtagctgcacttgaaacgggaggattaacaggatcaacagtaaattcatacgccgttgatgctttatttggtgctgggttactagggggaatattgtttactgtaatttgaaagacgatgctatatatttcatttggtggaagtgttgcaagtaatacacctgtatttggatccgcgttaggttgtaaaacgccatcgacagttaatgtgttaggaacaaatgtgagtccacttggtaatgcatctgtgaatacaatattagttgcatcggtattgcctacattggtaatagaagtagtataaaaagcagtttgcccgatatctgcaaaggatacactttcatttttggtcatagataatatggcttctttaatttgggttgaaacaggattgctaattgaagtttctgcttcaggtggtgagactaattgatacgatgttgatgagaaatttacaattgggtttgcggttggtaatgatgttacagtaacttggaacgaaactgttactgtagtcccggctgttattgtcccaatattcacaccgttcgatggatccgccccgctttgaggaactccattaatagaaaatgtgtttgcaataaatgtagtgatgcttggtacggtatctgtaaatataacattttgtgcggatgagtttccattgtttgttaaaacgacagtataagtgagtgtgtctccaatacgactaaaggatttatcgacttgttttaatgaaagaatgttagctgtattaatcgtagtaaacactgtgtttgaagtaacgtttcttgaaacaataggtgcattgggatcagcgataaatgtgtaagaagcagtagcggaattggcaataggattttgaacaggggtagaagtagcggtcacttgaaatgctatagatattgagctgttaggggcaattgatccaatcgttatgcctgtattaggattcaatccaatttgtgtgagtccatttattgtaacgctatcagtaataaatgttgtaccatttggtataagatccgtgaaagtaatattagttgcatttgtattaccgttattcgttaaaattgtcgtataggttatggtatcgcctagtgttacaagggtttgatcgaccgattttaccatcgttatcatagcatctaatacaggatttgtagcaatattcgttgaagtagaggtagtagcaggagcgctgtttggatcaacagtataagaatataaaattgtgtcattacccataattgaactggaaggggaaacggaaataacatttacttggaaagtaacagttaccgtttcaccaggagcgatatttggtatatttactccaagtgctggttgcgcaccagactgctgaacgctatttattgtgactgaatttggtataaaggtagtgttagctggaatagcgcttgtgaaagtaatattcgttgcggctgtatttccggtatttctaatagtagttgtatacgtaatcgtatctccaactgaaactatagatttatcagcactcttttttgttgttaaaattgcactattaatagttgtcgaaaccgtattagatacattcgtttgcgatacggcaggttggctaggatcgaccacatgtgcaaattgtacagagctataattagaaattggatttatacttggaatgtttgtaacaagtacgttaagagtaatcacggccgttccatttgggtttatatttccaatctgaattccgttagctggatttccgatttgctgtgtaccagaatcgtttgtaagagtgccagatatgaatgtcgttccatcagggaaagtatccgtaaaaattatattttgtgaagtgacatttccagggttatttaatgtaattgtataagaaattgtatcgccaattgttgcgaaagttttatttacagatttgattgccacaatttccccagaatttatttgtgtcgaaaccggattggacgtcgtacttcttgaaacgagtggtaagtttggacctgtcataaattgataattaatggaagcgctgtttacaaccggtgagtttggtccgcctggtccaattgtgaaaattggatttggaatgctaactacttgcacacggaaggtaacgtttataaaatctccagcaataatatccccaatcggtatcccattcgctggatttactccaggcaataaaactccgcctactcgaacgctatcttctataaatactgtgttatttggaatgggatctgtaaaaatgatattcgtagcagttgcgtttcctatattatccaataaaacagtatacgttaaaaatgaatttccaggtgctacgtcagaaaatagtcgatctacacttttcgttgcttgaataatcgcttcgttaatttgaactaaagttggattacttgtagctgtttctatcaccggcggctgggtaggatcaataatgatcgagtatgttgtgctagattggttcaaagttgggtttgtagctggtattgagccaacgatagcttgaaagctaattgttgtcgttcctccaactggaattgagtctaaagagattccgctatctggtctaaatccaagttgtgggattgtattaatttgtacgctatcaggaacgaatgaaagttcaggtggtaatatatcgataaaaacaggtgtgtttgctgaagtatttccgctattggtgaggatagttgtatacgtaattgtatctccaacagcagcaaaagcactgcttgcagtttttgttgcgataacggaagcagtatttacttgtgaaaaagttttattagattgaactgttcgtgaaactggcggttcatttatatctacaataaagctatattgaagcgatgatttgttcgggattggattcgggtttggaagtgttgtaatgtttacttgaaaactgagtgtagcagatgcatttgaattcaagttaccaatattgataccgttttgtggatttgcattagtaatagttgttccatttaccgtaaaactatttggaataaacgttgtaccatttggaattacatctgtaaaaataacattgtttgcggtagtattaccggaattagtaatggtagaagtgaaagtaagtgtatctccaatagtagcgaatgttgaattgacagttttatttatagaaagagtagcatcaataattggagtaaccgttgtattcgtaattgtactattgacggcaggtgattggttgggattcacggtatattcataatttacaagagcattatttgttaatgtgccactaggtggtatcgctaaaatttgtgcttgaaaagtaataaatacagtatcccctggcgaaatatctgccaagtgaataccaagtgatggatctaatcctggttgtgggacattattgatcgttacggagttttggataaatgaagctcctgcaccaagcccatccgttaaaacagtcgcactagcaggagtattacctgtatttgttactgcaatcgtataggtaacgatatcgccaattgcagctgtcggtgtattcacagacttagtagcgacaatagtagcgttattaatttgagttgttattacgttacttaacgtattggcggatgctggaggtaagttaggatctacgacgtactggtacgttgtattgctttggttcgggagtggatttggattcgggatagaatttacttgtacttggaacgagatgagcgtatttgcattcggatttattggatcaatggcaattccacttgctggatttacattaggcagtgtattcccgtttacagtaacactattagcaataaatgatgtcccgtttggaattacatctgtaaatattacatttgatgcaagtgtgttcccgttattcgttaaagtagtcgtgtacgtaataatatcatttacgttagcaaactgtttatctgcagatttagtagcggcaattgaggcgttattaatagttgtctgtacagtgttagaagcaaccatctgcatcacagcaggtttggatggatcatacgtatattggaatgttgtgcctgattgatttgtaattggatttacagcagggatagttggtacaaaaacttggaatgcaacggtgcgtgatgaattcgctcctattgtaccaattgaaatgccggtagcaggatttgcgttagctacagggacattattaatcgttacagtattaggaatgaagagggtacccgctggaatgatatctgtaaacgttacattagcagcagggatattcccgttatttgttaaaatagtcgcatatagtatgacatcaccaacatcagcgaagtttgtactcgttagttttgtagcaacgatattagcagtattaatttgtgtagttactatattgctagcagcgtttctaacaagagcaggtaaatttggatcagcgataaagctatattgaagtgaagcgctgttttgaattgggtttggtgaaggtagcccatttgcacttatttgaaaaacaatcgttgtaaaaccacctgaaggaatggagccgacttgaagaccggtactagggtctgcacctagttgtaaagcaccacctataaaaatactatttggtacgattgtggtgccattagggattatatcggtaaaaataacattatttgctatagtatttccaagattagctaaagaaattgtatatgtgattggttgcccgacatcggcgatagttaaatctacttctttgacaatcactacatttgctaaattaatttgtgtacttacagtgttacttacagatgtttctacagttggtggatcgcccggatttagaataaaactatactgtgtactagatgaatttatcgttgggttttgtattggtaaagaggtgacggttacttgataagagacggtaagtgagccgttagcagcaatggaaggtagtggaacacctatatttggatctgcgttattttggagtacaccattaataagaaaagtgtttggaataaaggtagtaccgtctggattcgtatctacgaaagtaggactatcagcagaaacacttcctgcattcgtcaaagtagcagtataagttaatatatcccctacggtagcgaacgctcgatccactgttttggctgaaatgacatttgcatcgtttacttgagtaaatgtagtggttgaagtagtgttcttacttacaggtgaagcgtttggatcaacaataaagttataggagatggaagcgctatttgaaatagggtttggatttggaatgctagttattactacttggaatgaagctgtaattgtagtattagcattgatgctaccaatattgatgctagttggtgtaacgcctggttgagtaacaccgttaactataacgctatttggtacaaaggcggttccattcgcaattgaatcggatagtaatacattgttcgctgcaacattcccatcgttagtaagagcgaaggtgtaagttaatacatcgccaacttccgcaaacgttttatctacagatttattagcatggagatttgctagtctaattgttgatgtaacagaattagaatttgctgtctttgaagtcggtggcaaatttggatttacagtatatagataagaagcgaaggcattattaatgataggattttgggtcgtaatattgatgactgttacttggaaagaaagggtaaaagtagccccgccaggaattgtgccgataggtaaagcgacgagagaatctacattttgcaaaactccgtttagtgttacagtaccaggagttaatatcgttccatttggaagtgggtctgttagttgaacgctattagcggccgcatttccactgtttgtaataagaattgtataacttatcgtttcgccaattgtggcaaattgtttgttagttgattttgttaatgttacattcgcattgttaatttgagtggaaacgagattagaagaaatgttttttgtaacgggtgattggctagggttgacggtatattgataagaagcacttgatccgttagatacgacatttgacgcgggtattgtatttactactacttgaaatgcaacattttttgttgtgccgcttgggatggatccaatattcacgccgttagcgggatttgcgcccacttgtgtcgtgccatctattgttaaactgtttagaacgaaagttgttccagtagggatgacatctgtaaaaataacattgttcgcatttgtattacctgtagctgtaaaggaaacggtgtacgttagtgtatcaccaatatctgcaaaatttttatctactgctttcgtcattgttacagtagcattattcacttgagtggagacaatatttgtcttatcagtcccacttactgctggttgattaggtacaggaatgtattgatatgttgttgttccactatttaatattgggtttgtttgagggatagaaggaacgagtacttggaatgaaatagtagtagtggaatttgcggcaattgacccaattgatataccattagcgggatttgctccagcttgagtaactccgttcacagttacactccctggaatgaaagtagtcccgctaggaatcggatccgtatatatcacattcgttgcagcgatatttcctatattagctaaggcaatactgtaagttaatgtttcaccaatatcggtaaaaagtttgttaactgattttgttccattaatatctgcgaggttaatttgtgttccagcagagttgcttgttgcaagaccattaaaagttgttcctccggcgattggtgtatattgaaatgtaatattagcagtgttagagataggattttgacttggaagagaaacgacagtagcttggaaagttactgtacgagaagcaccattattaattgttccaagagatataccagccgcaggatttgcatttgtttgcggtacgttatctactgttacagtgccgggtataaaagaagtaccgctagggagactatctataaaaatagcgttattggcaggaagaagcccggtgttagggatagtaactgtataagtgagaatatctccaattgcagcaacacttttattcacgcttttcgtcgcttgtatatttggtgagtttatattaatttgtaagcctactgtatttaacatatatgcgtccccgttagtagttaaacggattgcggcggatacttgtgagtttgttaaataaggagaaatatcaatggaagtaatgtcccagccctgtcttcctgcggagatgtttgtacttgtagaagcactttgatttcgcgttccgaatgtccctgttgtatctaagtttcctgcagcattattaacttgagaaccgaagaaattatttatagcattgtttggtccagataaagcatttaatgaactgaaatttggtccaaataaagcttgatccccggttaaatctgcatctccttcggtagaacttaaaaataatctcccgcttactggtcctcctgaaggtgttaaaaatccagaaacagatacatcggcactaccagtttctgcagaaacacggttaccagctacataaatggttaagtttcttgcaggtaaggaaccattttgataagcgacaatgagcgtccatccagaagaattgatagccccattagaagcatctaaaggatcaacaagtccagggacagagccggttgtataagagccagatccagcagcttgaacgagggatgttacatctgcagatcgtgtatagaatccaaatgtgacagatccagaaacgaaagtttgatttgaagctgtaatagccgaaggggtaattgagtatgttgacacaggtgttgtgaaagaaacaggattccctaaaatactcgtaatgttttgatcacgagataaatagtttccaccccaaacgagttctgcgtaaagaatagtactaccagcagggatatttaaaatagtggtagaactattttgtgtatagtttaacgttgtacctgcaggaaaagtaggtacttgtaaagcagtattcgtagttacgaatgcaccaattgcaccaattgcaccgattgtaccagcacggttttgattgctaattttacttaagcctaaagtattacctgtaatagcgagtgcgccgttagtggtggtagaaaatcgattcgtaatgggcatgttgtcacctcatttacaatatagtcttggtcaaaataacatatgtgtgtgacaaataaagcgaaacatgtacaagttgatttcgtaataatgatttaaatgtctagataaggggatggagtatgattgaattagaaattaggttggagcgtcttagggaagaacaaataggcgatattgtagcattgtcttcttatattggctgggattataacagagaagaagttgaaacaatttttaactcaggtattgtatacggcgtatggaatgagagaaaggaacttattgctagcgcggcaataatattatatggggagaaattagcgtctatcggaatggtgattgtacatccagattataaggggagagggattggaaagataataacggaagcgtgcgttaaaagcgtatcagctcatactccaattatgctgattgctacggatgaagggaaacctttatatgaaaagttaggatttagggcagtaagttatgtttctaaatacatatgtaactcatacaatgcgaaagattattgtgtaagaaatgaagattatgtgatgaattatgaagagggtgatttagaaaaaataataaaaatagatgaatatgcgtttggaacaaatagaaaagagtttttaaagaaaagaattatgcaaagtgaacagtgtatcgttgtaagggacaaggaacaaaatgtattaggttacggtttaagcatacaaacaccagaaaataagataatagggccggttgttgctaaaaatgatgagatggcaatgagaatagtacatgatttagcaagagggcataatggtaaattaagaattgatgtactagaaggaaagaacgatttcatgaaagaattagagattgctggttttaaaaaggtgaatataccgccaattatgatgaaaaatagtaatcggttaataaacagaaatagtgaactatatagtattgcagcgcaaatttttggataaaaaagaacccttttaaatgaaggattcttttttgagccaatttaatcacgatattggtcatgagttggctgaaagaggtcttcctcgatatctcgcaccatagaaaaatgatcaacgttataatgaccgtgtaaagttttattgtgatgaccaataatttgttctgcagacaatacgttagaatcagttgttgaatgaccgtttttaattaatgtaacgtcaaatccttgtacagttgctgtcctaacggcagtgtcaatgcaatgttctgttttacatccgcctataacaatatgattaatgttttcttcttttaaaagttcaagtaaagaagtaccgtagaatgaattggttgctgctttattaataaagattgcagactggggtacttgaatttgattatgtacttcaaatccttcgccactaccagaagcaacatcgatatctcttacgaaaacaataagagcatttgaatctattgctttctggagggctatatttagtgtagataatagctcggttttacgaaaaacttcattttcttgctcatttccatcaattaattcttgctgagcgtcgataattaatagtgcttgtttcatcgtgtctcccctttaatatgaaataagttccactgtacatattccttcagattattagaaaaccctccattgtaagagaagtagaagattgatttacaaagttgtcaaagaaatttcattctcatagcgtgtaaaaacatgtatgataggagatggagaatttttgagtaggtgggaataacatgcaaacagtagaagattatctttcattcttacatacgaaaggatttaaattatcagaggaagcacaagggtttattatgtttggacaaggatatactggtgcgtctgatgggattgtgaacgcagcaatagaagcgacaattaaacatcaattgcagtttgatggtagttatttcgttgcgttattagaacgattgaaagaggaagaaattacagataaaaaaagcgctaaggcttttatgcggaagttacaagcgtaacttcacgcagcctgcgcttctttttttgttttggaaggtaattcaacaaaaatcatgcctagaaaaatacatagacatccgataatagcagaaatagaaagttgttcatttgcaacgagaacgcctgttaatgcagcaaaaacgggctccattgcgaaaataattgctaccctcgttggagaagtgtgtttttgtgccgatgtttgaatgaaaaaagcaatagatgttgcaaacagggcagttagaaagagtgcgaataaaaaggattgattcgtccatagtgatactgaaaataacttttcccaatcttcaaacaaaaaagcgcaaatagaagaaaatataccaacagctaatacttgagatgtgcttaataataaaggtgatattttcttagaaaagaagccgttaataagaatatgggcagcgaaagcgactgcacaaccgagaacaagtatatctcctatatttaattggaaagaatcagcagctgttaataagtataaacctgttgtagctacaacaataccaagtacgatgaaaatggtagctttttgttttaaaaagataaaggaaaagattgggaccataacaatgcttagcccagttaagaaacctgcttttgaagatgttgtatagagtaagccaaatgtttgcaataaataaccgacaaataagaagaacccaactattaatccggctaaactactatgttttaattcttgttttgaagttttctgtgagaaaataatttgaacgaataataaaataattccagcgaataaaaagcgaataccattaaacgtaaatggaccaacgaaagacatagcgttttgaacgacaacaaacgtagctccccaaataaaagagacaaataataaagcaagaggagcaatccactctcttttcacactcatacccccgttaattttgtaagatagcttttctagctaattcatcagctactttattttgactacttggaatccacttaataaaaaagagatcgaagttttttatgtactgcagtgcttcatctaaaagaggtgcaaatattttattttttgcgtattctttttcaacagcccgttcgacaagctgggaatctgtacgaaaagagacagtgctataattatgctcgatgcaatattttaatgctagaagtaaagcgcggtattctgcttcatgattggacattgttccaagtggtactgataattgtacaggcggctgaacgcctttaataaacactcctgcaccagaaggaccaggatttccttttgatgcaccatcaatatatacttcaatcaaaatgagaaacctccaaattataagattatcccctacttaaatatttttttgaagtaggggatagggtagttatccgattgtgatgctgtaacgacatgtaaatgtttcattcgcttgtaaagattgaattccctttttgtccttgaaatcttttgctggatttacttcatcagcgattccataccaaggttcaatacataagaaaggtgcgttatcccctggtgtccatacgccgacaaatggaaatccatcaaattctacttttacaaatttattatgtttatgagaacgaatcgaaatttcattcgtattcatatgttcaaaaataagtgcatcatttttgaataaatcgtatgtaagtggcaattcagtcgtattttcagcgattaattgctttttgtttgaaagataaggcccttctaatacgcttgtttctaagcgttccgaaccattaaacgataagtgataatctgtaaatgattcaccgtccaataaagggaagttgaatccaggatgtgctccgattgagaagaacatttctttagaagtaggattgtttacttcatatgttacatgaacactttgtccatctagctcataagaaacgagtaattcgaattcgtatgggtatttttttaatgtttcttcattactagtaacgatataagtgatctttgtttcgctttgttctttcacagagaaagtaagatcacgagcgaaaccgtgttgtgttaatgaatatggtttaccgtctacgtagtatgtattatctactaatcgaccgacaattgggaacaaaattggtgcacggcgtccccaataagtagaatcaccttgccataaatattctatgttgtcttcttttaagcgaacgctctgtaattctgcacctttgtcagaaatggaaacgatcactttttcattttgaattgttgctgtcatgaagtgaaacctcctaaatctttcatatgtttcattatacgttgtctaaaaggaaaaaggtagtttatgataggaaatctattgacgaaagaggggctaccacgtaaaatataatcttgttgctaaaaaaaagaataacgtggttcgaaaccatcccacgtaaaaaaactaaggagattttgtcatgaatattagaacattagtcggtaatggtattttagcggcattatatattgctgtttctatgcttattcagccatttggctttacaaatgtacagtttcgtatttcagagatgtttaatcatctcgttgtatttaacaagaaagcaatttacggaattgtattaggtgtatttttaacgaatctctttttctcacctatgatcgcttatgatttagtatttggagtaggccaatctattcttgcgttagttgcaacgattatttctatgcgatttattaaaggtgtttgggctcgtatgatttttaatacagttatctttacgattacaatgtttatgattgcaattgaacttcatcttgcattgggtttaccatttatgttgtcttggttaacatgtgcaatcggtgaatttgttgtcatggcgattggtatgcctgtaatgtactggattaataagcgagtacaatttgaaagatttatgtaatagatgaaagagctattcctatagggatagctctttttgcatgtgataatattgaatataattctttgactcttgataaaatataataaaataaagtgaggcttttattagctggctacatataagaagtcttacataaggggaatgtagtatgaaatataaaattcattggttgtataaaacgaagcgcggattgcagacggaattaacaacagagtatatgaacatagaagaaatacttcaatttgcagaggattttgagaaaacaggaagagtaaaagaattttcattttatgatgaaatggacgcagaatggtcattaaaagagatgaaaaagttaagtaagcaagtagaggaagagccccaagaaatactcgtttattttgatggggggtatgatgtgcaaacgaaagaagctggcgttggtatatgtgtgtattataaaaaaggaaatacaaactaccgcattcgccgcaatgcatatatagaaggtatagatgataataatgaagcggagtatgcatcactattatacggtatgaatatactcgaggaattagggattaaatatgaagcagttacacttcgcggcgattctcaagttgtattgcagcaattagccggagaatggccttgttatgatgagcatttaaaccattatttagatcaaattgaacaaaaggcgaagcaaatgaaattaaaacttgtatgtgaaccgatatctagaaaacaaaataaagaagcacatcaattagcaacgcaagcattagaagggacagtcattgatagtcataaagaaataaccgaatagagaggtgcaaaggtggataaaaagcaactcattacagaggtaaatgacttattagaaacatactgtgaaggatgtttcttgcgagaacataatcgaaagacaaatagtaagtattatgctcattcattttgtataagacaatgtacagttggagaaacattgaaaaagtatggagaacagttgtcataaaaaaacatccagagaaaattctctggatgttttttagtgctttgcttcgtttaattgctgctcgcatttgcttagtttcttttcctcgttcattaaaaatggttcatctaaatctactgcaacagatttcataatttcaagctgtgagcgagctgcttctactgcagtagtggcatgctctaatgtgtctggatccattgaaattgttgcagaacctaccatcttttgtgctgtttctacacggaattttacttcttcaaaatcatttacttctgatcccattgttactgcctcctttgtatattgcgcatttcacatagtttttgctctgtaaaacggaaatatacaaaggaataataaaggaggttaccaagtaaggtaacctcctgttatatgttggattaaagttttactacgttagcagcttgaggtccacggttaccttcagtaatgtcgaaagatacttcttgaccttcttctaaagctttgtagccatctccttgaatagcagagaaatgtacgaatacatcgtcagcgccttccatttcgataaatccaaaacctttttcgttgttaaaccattttacttttccttgcatgttataattcctcctaaaagcgtttactattttcatttagtgaaattcatttgaaaaataatataaactaaaaatgctatattcttgaatattctgctaaatgattaatttaaatatacacgaattgggagaatttagtcaagtaagcgattttattttttgtatttttaaataatttttcagtcgaatttttaaataggtataggacaggccgagtatgtaatattcttaattgaatgctatacataatgaggtgaaagaatgaataagtcttacttattagataatgaagaaatgagaacgagaaccgacataccggattgggttgcaaaagaatttgagattttttcaagtgtcgtgttagaaccaacttttccatgttatttcggtttaacagctttgaaaaagaatgaacttcgctattcatttctttctcataatgattggagtcatttgccacatacaatgttatcttttttagagttaatgaaagagaggccgattgtaagaaggggctttttcctttttgtagaaccggaatgtgaagaacaatcactcgaatattaccgtgattccttttggaaagtgctacagtatttacatgaaaacgataatcaagcatggccaaagcaaattcctgaagatccagatcattatttatgggaattttcatttggtggtgagccaatatttgcatttggaaatgcgccagcttataaacaacgaaaaactagacatttagggaattctctcgttattgggtttcagccacgcactatttttgatggattagagggagatcgtcctaaaggagcatattcaagacaaatggtccgtgagcgagttgaaaagtgggatcaattgccgaaacatcctaacattagtcattacggtgacccagagcatcgtgaatggaaacaatatttcataggagacgatgtagagctaataaaagggaaatgtccttttcttcataggatagaaaaataagagccatcatctggatggctcttttgtatattttggataaaaaagggtattttattacgaaagctagtctattttttcaaattatatcattaactagtaataaagagagtagaaaggatagagcgatgtttggagcaattatacagcaaatcgtattaggtatatcattagctgcgccagtagggccgattaatattgaaatgttaaaacgaggaattgaacgtggtttttggcacgcttgggttgttggaattggtggaatgactgcagatgttttatttatgcttctcatttatttcggtttatcttctgtgtttatgtatacatatgtacaagccttcatgtattgcacgggttttttcttgttattttatttaggatttcaaagtgtaaaacaaggaattttcgaatcgaatatggaatataaaaaagaagaggtaggtggccttaagcaatcgtttatggcaggatttttaattgcgatatccaatccattaaatcttgttttttggtttggtatatacggaagtacacttagctcattacttacgaaggtaacgaaacaagaagcttttttgtacagtctttgcattattgttggtattattttatggaatttaaatattgctttttctgtacattttggaagaactttattaaaaccaaaagcgcttggctacataacagccggagcaggtattattttagtaggttactctatacattttgcatacaaagctttacagttgttcacataagattgaaggggagatttttatgtatcgaaccactattgacggaaaagaaattataattacgttagcgccaaaaatccgaaaagaaattactgatagaaatccactatatgaagcggtatttcataatgctgcaagattgttacaaacaaagcaaccgacgtttgcagtaaatcatgaaatatttgggctcattattggagaagtgcaaagaggagaagtaacagtgtttgcagtggaacatattattccgaagcaaaatatatttggatcaaacaattttttctcggcaatagaacagcaggcaaatttgtaaagtgaatagaataagaatagaaaagaaatagtcgtaacgatatgttgcggctgtttttttgaaaaagggggaaacaagatgaagaaagtggggaaagagttctttttacaacatgatattgttattatgtatagcattctatttatttgcattattattttaaaaatgcaattttttacgtggtttggcatgttagcatgtatgtttgggattgttttctatacacttaatgaatatatgacacatcgttttttattccatataaagccacctaaaaacacatttctattaaaaatgttaagaagattgcattatgatcaccacgtatatccagatgatttaaaacttttgtttttacctgtatggtttagtatacctagttttactatatatttacttatagcatatggtattacaaaaagtgttactattgcactttcatttggaatcggaatgattattatgctgctcgtttacgaatggaaacattatattgctcatagaccgattcgtcccgtcactaagtttggaagatggctaaaaaaacaacatatattacatcattataaaaacgaaaagttttggtttggtgtttcaaatccagtattcgattttatatttggaacacttaaagatggaaaagatgttgagttaagcgaaacggctcgtaatttagaaaaggaaaaaaagacaaaagtagtgcgttaagcactgcttttgtcttaatgaggataaataagtaaggtgtcactttattttgaaaaagtatattaaaaatttaggggaaattgccgaaaaatgtctatcaaaaaatctttgcatgaatgcatggattgtctaaaatgaatataagtttctgaatatttataaaatttagtctttaggtatgcaagggggaagtgtattttaagtaagagaggggatcggttaatgaaacgagacgatacgtcagcacgtaagttgcaaaatgaggtgaattatacagaggtcgttcagtcggaagaatttcaattgttattaaatacgaaaaagaagtttatcattccaatgagtattttcttttttagtttttttatcgcattacctattctaacatcgtattcaaaggtgcttaatacacctgcatttggagacgttacatgggcgtgggtatttgctttttcccaatttattatgacatgggcactatgtatgatttatagcaaaaaagcagaatcatttgatgaaatctcccgaaaaattttgcaagatatgcaaaaagggaggggctgaacttgaatactactgcatttgcactatttttaattattgttcttggtacgctcgtcataacctattttgcatcgaaaaaaacgaaaaatgcgagtgaattttatacggctggagggggattaactggttggcaaaatggtttggccattgctggagattacatgtctgctgcttcatttctcggtatagctggagcaatcgcattaactgggtttgatggattcttttatagtatcggttttttagttgcttatttagttgtactatatcttgttgcagaaccgcttagaaatttaggaaagtacactttggcggatatgattgcagcacgctttgacgcgaaaaaagttcgcggagttgcagctcttaatacgatgacgatttctatcttttatatgattgcacaattagttggcgcgggtgcacttattaaattattattagggattgaatatacgacatctgtattaatcgttggaacacttatgacggtgtatgttatttttggtggtatgacagcaacgagctgggtacaaattgtaaaggctgtattacttatggccggtacgtttattatttctgttatcgttttcgcaaaattcaacttcagcgtgactgaaatgtttgcccaaatgaaaacagctacaccattaaaagattcatttttaaatccaggtgtaaagtataaggatggccttgatacactttctttaaatttaggactagtacttggtacagctggattaccacatatacttgtccgcttttttacagtacgtgatgcaaaaactgcacgtcaatctgtcgtatatgcgacatggttaattggtgcattttatattatgacgattttcttaggatttggtgcggcagcgtttgtaggaaatgaagcgattattaaagcgaacccagcgggtaatatggcagcacctttattagccaaagcgttaggtggagacttcttatttgctttcgtatcagcaattgcttttgcaacaattttggctgtagtggcaggtctcgtattaacggcagcatcagcattcgctcatgatttttataatgagatcattcgcaaagggaaatcatcggaaaaagagcaagtatctatggctcggtatgcatctattggagtagcgatattatctatcatacttgcattatttgcccaaacattaaacgtagcatttttagtatcattagcatttgcagttgcagcgagtgcaaatctaccagtgattttatttacaatatattggaagcgttttaatacaacgggtgctatttcaggtatgatcgtagggctcgtatcagcaattgttctcgtagcgttgagtccgaatgtttggaaccctgtagctggaaaagctatttttgttggggaagcgatattcccatatacgacaccaggaattatttcaattccgctcggatttcttgcagcatatttaggaactgttttatctagtaagaaagaagatgcagcgaaatttgatgaaattcttgtgaaatctaatactggtcacggtattagtgatgcgtcttcacattaaataaaagaggagcttttcgatagataagaaaagctcttttttcttttgtcattttcttgtaaatattactgatttgtaagtaggatttgtcttaattttgtggaatgaaaatagcagggagaaatttaagtcatcatggcaccagcgcagcttttgtgaaaaataagttgttatggaaggtggaagtaatgatgaaaacgaagcaaactgatgaattattagcaaaagatgagcaatatgtttggcacggaatgcgtccctttagtccaaatagtacaatggtaggggcaaaagctgaagggtgctgggttgaagatatacaaggaaaaagatatttagatggtatgagtggtctttggtgtgtgaatagtggatatggaagaaaggagctcgcagaagcggcttataagcaattacaaacattatcatactttccaatgtcacaatctcatgaaccagctataaagcttgctgaaaaattaaatgagtggcttgggggagagtatgttattttcttctcaaatagtggttcagaagcgaacgaaacagcttttaaaatagcaaggcaatattatgcgcaaaaaggtgaaccacatcgttataaatttatgtcacgttatcgtgggtatcacgggaatacaatggcgacaatggcagcgacgggacaagcgcagcgtagatatcaatatgaaccgtttgcttcaggctttttacacgtaacaccaccggattgttaccgtatgcctgaaattgaagggcagcatatttatgatgtagaatgtgtgaaagaagtcgatcgtgttatgacgtgggaattaagtgaaacaattgccgcttttattatggaaccaattattacaggcgggggcatattaatgccaccacaagactatatgaaagctgttcatgagacgtgtcaaaaacacggtgccttgcttattagtgatgaagtaatttgcggtttcggacgtacaggaaaagcatttggatttatgaattatgatgtgaagccagatattattacgatggcaaaagggattacgagcgcatatttaccattatctgcaacagctgtgaaaaaagaaatatatgaagcatttaaagggaagggagagtatgaattcttccgacatattaatacatttggtggaaatccagcagcttgtgcattagcccttaaaaacttagagattatggaaaatgaaaatttaattgagcgatctgcgcaaatgggttcccttttattagagcaactaaaagatgaaattggggaacatccgcttgttggggatattagaggaaaaggtctattagttggaattgaattagtaaatgataaagagacgaaagagccaattgataacgacaaaatcgcaagtgtcgtaaatgcttgtaaagaaaaagggcttattataggacgaaacggtatgacgacagcaggatataataacgttttaacattagcgccgccgcttattatttcaagtgaagaaattgcctttgttgttggaactttgaagacggcgatggaacgtatttaataaatagagagaggagcgagctgtaatataaggctcgcttttgttttttagtaggaggggacttttaatggagaaatatgatcctaacaaacattatcatatcggatattatgaagacggatatgatttagaagtgacggcgtacaaaagaataaatgaaccagtttgggatgcttatcttccgcactatgaggtagacgatttttacaaaaagtggagaaaatgaagctaggtgaatatatagatgactatggtattaaagtatattcatttagtaatgacatcgatgatgaagaagcacgaactatttttgaaaactggttaaaaacgaatggaattgtttaaagataaaatgaaaaaggagattactatcttgtaagatagtaatctccttttcttattcttatagtaaatttacttacttacttacttgcttgctttcattgctttatcttttgcaccaaaagtgtattttaacattggtggtgtaatcattgtagttaaaataacgacaataacgattgctgtaaagtaatcttgtgccaatagacctgaagaaagtcctgttcctgcaatgataagtgcaacttcaccacgagaaaccataccagaaccgataattgcagaagacttagcatcaaatccagtcatgcgtgcaccaacaccacaaccaattagtttcgttaatacagcgattactgttaatgctaagatgaaccaaatttgattgccaataccgtcaaatgtaatattcataccgatactaacgaagaatactggaacgaacatagcgtaagcaattggttctactttcttttctacttcatgtttgtagtttgtttgagaaattgcaataccagcagcgaaagcaccgataataccagcaattcctaatagttcgccgaaatatgcgaatgagaaacagatgataagagctgcgctcacgatagactcagatacgcgcagtggtgacaaccaacgcataattgctggaacacctttccatccaattaaaataatagaagcgaagaatactactttcttcaagataatcattgttaagttaacatcatcagtgcctaagaagctcattgcgaatgctaataaaataacaacaagaatatcatcaaatacagcggctccaagcatcgtcgtactttcacgtgttttcattttacctaaatcacgaagtgtttgtacggaaatactaacacttgtcgcacatagaagtaatcctaagaatacagcgtttccttgttccattcccataacaaggccggaaacgtaaccacctacgaatggaagaataatacctccgagtgcaactgctaaagaagaattacgattggcgtttaattcttctaagtctgtttcaagtccagccataaacattagaagaataaccccgacattacttaattgagttagaagctctgaattttcaatccaacctaatacagctggaccgataacgataccgacaattaatttacctagtacagaaggttgacctaatctaacactaagatcaccagcaagctttgtacttaataaaataagtgcaatttgaaagaaaaattcgaattccatctgatcctctcctcatcatttttagttttatcatacgatttctcggaatttgcctaatgaaaatatgtaaaacccattaaacaaaagggtctgattacgagttcttttgaacttgtaatttgaacctgtaattaatatataatatattttgcaaaaaatcaatgaaaaaatgggagcttttttagagagagacggtgttattagagatatacatataagaatagtgtgtgaatttttatatgtatgaaatagtatgaagtcctttttcattacaaataataaagcctaaatgctatttcacgaattataaatgtgaaaaggaggttttatcatttgaattcattaaaaaataacttgtctattgttgctttaggtggagtaaatgaaataggaaaaaatatgtatgctatccaatatgaaaatgatattgtcgtcattgattgtggatctaaatttccagatgaaagtttattagggattgatttaataattccagacgtcacatatttgcaagaaaataaagaaaaaattcgcggtttagtagtaacgcacgggcatgaggaccatattggcggaataccatattttttaaaacaactaaatgtaccaatctatgcaacaaagttaacgttaggtttaattgaaattaaattaaaggaacacaatcttcaaaatgatacggaattaatcgttattcattcagaatcagaaattgattgtggttctattaaggcaaccttttttaaaacgaaccacagtattccggattgtctcggtattgtttttcatacaccagaaggtactgtagtacatacaggtgattttaaatttgatttaacaccagtaaataatcaacatcctgatattcataaaatggctaaaataggaagtgaaggtgtactagctttattatctgaaagcacaaatgcagaacgcccaggttttactccatcagaaaggtcagtaggagaacgggtagaggaaatatttatgaaagcaaatagaaaagtaattatttctacatttgcttctaatgtgaatcgtgttcagcaaatagttgaagcttgcataaaaacaaatcgaaaattggctttgctcgggagaagtatggtaaatgtagtagaagttgctctagagaaagggtatttacatattccagacggcatgttgattgaagcgagtgagataaatcgtttagatccaaagcaggtagcgatactttgtacaggaagtcaaggagaaccgatggcagctttagcgcgtttagcgagtggaaactatagacaagttgatgttttaccagaagatacggttattatagctgcgactccgattccaggaaatgaacgtaacgtttcaagaattatagataatctatttgctttaggagcaaaagtaatttatggatcaggtagttctactggagtccatgtatctggtcatgcgtatcaagaagaattgaaattaatgctcactttaatgaaacctaaatattttatcccaattcatggagagtttagaatgctacatcaccatagtttgttagcagaatcaattggtattgaaaaggaaaatatctttatcgtacgtaatggagatgttgtagatattagtaatgaagtggcaattcaatctagaagaatacaggcaggaaatatatatgtagatggattaggaattggagatgttggaaatgcattattacgtgatcgtaaacaactttcagaagatggaatgctcgttatagttattacttttaataaagtggatggagaaataatttcaggtcctgatattatttctcgtggatttgtctatgttcgtgattcagaagaatttttaagagaattaaataaattagctgttattacaattaataatttaaagaaagagaatgtgaatagctggggtattttgaaaagggaggtaagagaagcgttagggaagtatatatatacaaatacaaaacgaaagccgatgattcttcctataataatagaggtttaatagtaaaaaaagaattctcgtatgggaattcttttttgttttgaagacaaaatgaacatataatgaaataaatagaaatggaaggaaataaaagatgttattaaataaacgttttacaattggagaaatggcaaaaatgcataatatcgcagaatctacattaaggtattatgatgaaaaaggaatttttcatccgtccattgttgatcctcaaacgaattatcgttattatacaatcgatcaattttcactattagatacgattaagtttttacgccaattaaacattccattaaaggaaattaaaaaatatattgatgaaagaaatccagcatacgcactcaatttactggaaaaacaacaagagatgatgctgaagaaacaaagagaaattgagtatgctttagcgaaaatggagcatagaattcatttaattaaggaagcaacaaaagcaaaagctgaacaaatggtaataaaagagatcccgcagcgaaaaataacagctattgcggttgccccgaatacgacggatgatatgtttgagtactacattcattcgttgcaaaaaaatatgaggcaaatggatgatagcttattttctggagatattggtgtaactgttgcgaaaaaagggttaatgcaaaatgagtttcaagcatatagcagtgtatttattcttttggattatatgccttttgaagtacagagttcagatgaaattaaagaaggtatgtttgcctgtgtatatcatcatgggccatatgaagaaactgatgaaacatataagaagctaatgaaatatattgatcaagaaggatacgaaataagtggagatgcaattgagattgcattaattgattggtctgtaacagaagatcctgaggagcaagtaacagaaattcaaattcctataatgaaaaaacaaagcaataagttatagggctcgtataattacaaatgagcatcaaacgcgataattaagtcacctattttttaattctctattgaccttaaagttacttgaaggtttaaactaagaaaagagagttgaaaaaaaggagcatattagagtatggaagcaacagaaaaattaagagaaaaaccaattaaaagcttatttatttcttatttaataccagcagttcttggaatggtattaatgtcagtgaatattgtaattgacgcggttatgattagtagaggagttggggcgaacggtttagcaggagtgaacgtggctattccagccttttcgattttcttctctatttcattatggatcggaatgggcggggcaacgttatactccattgcattaggtgaaaataaacgagaaagagcaaggtctatttttactcaatcaatgacggtagcagttgttatcgtagggattttagcagcgatttgcttatggagaatagaagatttagcatacttatttggtgcaaacgaagtgattctaccatatgcgttagactatttacacgtattattaacatttggaatgatatacgttttagaaaatattttaagtacatttatacgaaatgatggaaatcctaatttagcaatggctggtcttgttgtaacggctgtattaaatatagtgtttgactatatctttatttttatctttggatggggcgtaacaggtgctgcctcagcgactattctttcggcagcgattggtttccttgtattattaacccatttctttagaaaaagtagtattttaaagtggacgaaatttcattttgaatgggatactgtcaaacaaattatggtgattggtttcccaagttttacagcagaaagtacggttgcaatcgtaacgattggttttaatatcgcatttgtccaatatgcaggagaagtaggagtagcttcctatgcgatggtgaatagtattcatgcaatgacattactattattctttggtgttggagcagcattacagccaattgctagtttccattacggggcaaatttatcagagagacttcgtgaaggattgaagtttgctgtgaaaattgcagttgtccttggaggcgttgcgataattgtcggattattcttcgggaaatatatcattggtttatttgatgttcaatctccagaattattggagttaaccttaacaggtattagtttattctttatccaatacgtatttttaggttataacattgtgtatggagagtacttccaatcagtgcgacaaacgaagaaatcagtacttattataatgagccgaggattactatttattattccattgttatggattatgccgaaactatttggtataaatggaatttggctcgttatgccagttgcagaagtaatgacagcgattatcgtatttacgatgaatcgtatgaaacatcctgttccattaaatatggcaggagagaaagaagcgatatgataaaaaatccccttaagcaattaaggggattttcttattcctttaaactaatagcaaaagatccatccgtttcttgaacagaagcaaaggcaacgtttttaatatttgtaattcctttttcttttaattctttatataaccatttttcatctttatgtattaactttaagttatcatattgaatttgtgaatcgacgataagtgcaattggtaatccagcatacttaacatctatgtttaaatcttttggagttaatggtacaagttctctttttggtaaaatactaatagcgccgttcgcttctaaaatagcgtattcaatttcatgaacacttggatatcctgcaacgcgaagattagaaagcagttctgcaatggggtatctacttttttgtaagttctcaaaaataatatcaccatgtttaattaaaatgatagggtgtccgagaataaaacgatttagtttgttgaataggcttaattttgtaaggagtaaatgtaaacatgtgataacaaccataccgagaaatgcttgtaaagcaccagagacgggtatggcctggaaagctaaataagataaaaaaattatagccccaaaatcatgaggagttagttgcgctaacgcggatttaccgagtaacttaagcgatagcaaaaataagatgaaaaagaacgacacgttacataaaaagagaagcaatagagacactccttcgtgtaaagttgtacttactattcccgaaagtaatataaatattacctttcagaggataaattagggtttattggaatttgtctgtatacaaacaaataaatggatattatcatgaaggaagtaaaagaaaataggagtatatgaatatgagaaagaagaaaataatgaagggcattttagttgttataatgatttgcgccgtgtatgcggggtttttacaatatcacatttataagcatgggcatatgaatgcaacatacgatgctgattacataattgtactaggatcgaaagtaaatgggacgaaaccatcttattcattgcaatatcgtattgataaagcagctgaatatttaaaatcacatgagaaaacaatcgctatcgtatctggaggacaaggaaaaggcgaagacatttcagaagcattagcaatgaaacaaggactaataaaacaaaatatcgcagaagaccgcattataatggaggacaaatctacgagtacagatgagaatattacattctcaaaaccgttaattccagccgatatgaaaaaaggtatgatcgtaacaaacgattttcacatgtttagagcgaaaaaaatagcggccaaacaaggtttacaattagaaggtcttccggcaaaaacaccgaaaccaatcatcattccatcgaatgtacgagaatatttagcaattacacagtattggtttatgaatcgaatatagtgaaagtgatcccgtctgaaactcaggcgggatttagtttgaggaaaatcttacaaatatgtcacgttcgtgaaaggtaaagcgatagtttctagaatgatttcctgacataatgaaggtaacaaaaactatttagaggtgaatcggatgaaaggaaataatattttatcttcgttatgttactttagtatcttttttgcaccatttttactaccaattatcgtgtactttgttgcagaagatgaagtgaagtatcacgcgaaaaaagcattttggtcacatgttttcccatacgcaatcttatttggaggactagcagtatcaggcatgtacggtttaggtttcaatcaatctgacggtgctggaattggaatggctatcacatatgcagtgttcattcttgtaggaatttactacttcatttggaatatcgtaaaaggtattaaagttttgaaaacggcgtaataagataattataatttcatttaccgtatcgataaacgttttaaaaaagggcaattcaaaaagaattgctctttttgtgcttataagttgtgaaaattgaaaaagatatgttaatttttcattatgaagagaaaaaaggagtgattttcatgaatgagatcatacataagatggagcaacatgtttcagttcgtaaatataaagaagaatcaattccgaaagatgtagtagaaaagatggtgcatgctgcgcaacatgcagcttcatcacattttgtacaggcgtattctgttatatatgtaacagatcaggaattaaaggctaaactagcagagctatccggaaatcgccatgtgaaggactgtgcagcattttttgtttgttgtgcagatttaaaacgacttgaaattgcatgtgaaaaacatagtacagagataaagcatgagggagtagaagactttatcgttgcgacggtagatgcttcactttttgcgcaaaacttagcactagcagcagaatcgttaggatacggtatttgttatattggtggtattcgtaataatccgagagaagtgagtgaactgcttcatttaccggataaagtatatcctgtattcggaatgacagtcggtgtaccagatgaagaacatggagttaaaccacgtttaccagtagcagcagttcttcatgaaaatggatatgatgaacaaaaatatgatgaattactaaacgaatatgatgaaacgatgaacgcgtattataaagaaagatcatcaaacaagaaaaacgtaacatggacggaatcaatgagttcgtttatgtctaaagaaaaaagaatgcatatgaaagagtttttaagtgaaaaaggattaaataagaagtgagtaaagaggcaaacctgtgatgcaggtttgcctttttgagaaggagaaatacctaaggccagaaagttgtttattctttctgaacttaggtattttgtttgttatcatgtacatagaaataaaaattaataattttttacaaaagtgatagaaaatgagaatgaaatgccaatagtaagtaaaagcggcataatagccgctttttatcgttttatttagtatttgatttgaaatattttccttatgaaagaaagattattgctaattgtaaactgtcaataaagttatttaagttttgatatggaataccccgccggaaaatacagcaataatttcgtttgaacatatctgttattgcacgatctaaagcatcttctataacaagttcaaactttcaataagaagataaccccctgtacaacttaaaagaatgtacgtaaatattttaaaaatccgttgattaagccatttaaaaataatttgacctataaacaaacctaaaaatacaattggaatggcataaaaacttgattcccaaatggttttgtttgtgccagtaaagagtatttgagttactagactaatgaaatatataaacagataaaaagctaatgtagttgctcttaacttctctttttcagtattagttcctgtaaaataaagtaacaggggtggacctggcataccgatacttgtcgttaaaagaccagataatccgccagctatgaaatctctagattgtgttgatttaaccttaacgttgcatattagcaacaatgttaatagtaagagtaggatgctaactgctaatttaaaagtgtttatgttaacggaaatgaaaattaaaatgccaaaaggaacaccaactatacttccaaaaataaaccttttcagtagaacaaaatcaacgtccattcttattttccaaatgagtgaaatggagataattaaagataaaataatgtttatttgtatagcttcttgtggtagaaataacataagtaagaaaggggttgccattatggaaaagccaaaacctgtacttgcttgcagaatagaagccactaatataatacatatgaaaaagaatgtgatacccaaaacagccctcctatttaatcaagtttaactagttaaagtctattatttaagtgcaatgtttcacaaacttatttgtattttaacataaatatctagttttttctcaaatagtgttgccatataaggctctttaactaaaaaatctgacttgtatttttaaacaattttattatggggaaacaaataatgaatgggatcaaaatgtattgattatcattaaattattcactgagatccccgcgataaaacaagaacagccatataaaacttacaaaaatacagcatgtagctaataaacagccaatcatttgaggagaaagaatttctaacagccctcctgtaaaaaacatcgataactgaataagagatccgtaaatggaataatggaatgaaaaaactttacctatcatattttcgtgtgtgtaagtttgaagtaatgtcgtatcaagtggaacgatgattcctcctgctatgcgcatacagaataaagtaatgataccgataataagttgatcggatagaatgaatccgagaaagaaagttccttgtaataagtaggcccaaccgaatacttttttcattttttctttattatgggatatataaagattaacgagaaggcttcctatcataagcccagccccttgaaccgtatataaaatcccaatgttcgtatggaaaattttttcggcatagatcgttagaagtagttgataagcacctccaataatcccccatgaaatgccgacaagaattaatgttaaaatgatttttgtttgtaatatgtatgtataaccaccttttatatcagtgaaaaatgctttcttcttgttacaagtatcatgagcaggaatactcatgttataaataaaataggctgaaataaagtatgataggctatttactaaaaaagcgaactcaatatgtaaagattgtgcaattactccgcccaaagaagcccccataatagacataaaaccattaattgtactagaaagagagttagcagttacgaaatgattttggtgtacgatattttttagggttgcttgtttagccggttcaaataaacaagaaagtacagataaacatatattagcaatgaaaataatctcaattttatagcctgcgagtaagtatgtaaggactagaattccccgtgtaatatcggtaaaaatcataatattctttttagagaaacgatctacaattccgcctatgaatggactaagaagaagctgtggtaaacttttacttataaaagtaagtgcgatcataaacggcgattccgttatgctgtagacaaatgttaataaagctaccgtatggaaccaatccccaagtacacttaatgtttgcccataaaatagtttattgaagtttttatttgttttaagaagtgtggaataagaaactgacataaatagattaatccttatgtaatgacgatgtttgaatttgttctttccactcacttaaatacactttttccgctgtgggaagtccaacaggtaattgtgcaatcaattctaaactatttccatcagggtcgttaaagtatacggctgcatgtgctaattccggaaaaacaatcggttcaattggttccattccaaagtcttttcgtgctgaaattcctttttgatttagccaatgaatcgcattttctaaatcatgtaaacttacttgaaaggcgatatgtcgtaaagaggggtgataattcactttgtattctgtgccttcccaaaggccgagccaactctcattttctttaatccaaaagaaagcaatattatctcctcttttatataattttagccctagtgattcataaaaaggtattgatacttttaagttgcggacaggtaaatgtgcttcgtaaagacctctaatcattgtaatcccccttagtaaaaatgtttcttattccatagtaaacaatatgttgctagttgaaatcgcaaataagagggatataaattcatacgaaagtatgaaaaaaacagctcatatttgagctgtttttctatagtttttagttcatttttcaaggataggatatattaatatccgtatccgccgccaccccaacagctacatccgatgatgattagaaggatgaatagtacgataagcaaagcaaatccaccgccgaaaccagcgcaacttccaccataactcatatgttttcctcctttttagtaagttaatctatatggttcatggactactatatacagtatgttttttgtatagaaaacgagccagtctcatttataattagacaaatgcctgtagattcattaggattgcatgttagtgatttgtaaataaacctttacgtaattcataatttaggcataaaaaataaaaaattgtaaaaaaaaccattttcttatttttttatgagagaatatgtactataattttacaagtaatattatgggaaaagggagttttagtatagagatggagatgggacaattaaaaaataaaatagaaaacaaaaagaaagagttaattcaacttgttgcgagacacggattggatcatgataaagttttgttatttagtcgtgatttagatatacttattaataagtttatgaatataaaagacaaagtgcataaataaaaaatttatagttttttatattaagatgtttcacagaaaggagaggacagtaattggaacatttacaggaagaattgtataaacaaataaaagaagaaaaaggtacagttacaattttcttaaagagtggcgttagaataataggagaagttgttggagtggataaatttacagttttaatcttagtggatggaaaacaacagcttatttataagcaggctatatcaacaataatgaaataagacactcttgttgagtgtcttatttcattattgcttgcatgcctcaacatcaatgccggcagcaattaacttcttttctccatcttgttcaataattttttgtaatttagataagaaagaatcaaagtttgtatgctttgctacttggaacgtcattttatgttcaattggtagccacgtatcaatatcagcttcgttatgctgaatttttacctcaagtttatcgagtgcattagcaacttttgcttcgtacgtttctttcgcttcaaactccatccataagtcatataattcctcgccgagagaacctgttaacgtttgtttaatatttaaaatagcctccagttcatttttttgtttttgtagctgtaattcgtgactattcattgtatcaaaagcaggaatatcaccagcttcggcttcgactaggtcgtgaataataaccattttaagtaatttctcaatacttactttttgatccaaataaggttcaactaaaatggccattagagacatccgccatgtatgttcggcaacactttcttgacgtccgttggaaagccagctatgtcgcatttcatattttagtttttctgctaatgcaatgacttgtaaaatgttgtgttccatcgtgatcctcctcatttattcataccataattctaatatagaaatgaaatgtgtcaattttatgagtatattgcgataaacagatgataagcgtataatacatgttatatgtgaaaacgtattattaaaataaaaaaatgttatataaaaatggaaaggaaagggcagaaatatgggagagaaaaatcaagtattagctagaccacaaagaagaaaaaggaagtttgatatttctagcccagtgggcattatagtaggtttcattatagtgatagcggcaattatgcttggtggcggtggaataaaagctttcaaaaactttttagatatttcatctattttaattgtcatagggggaacaacagcgacaattgttgtggcatatcgatttggagaaataaaaaaatatacgaaaagcatttttactgttttacatagaagagaagaagatttagaacagttaacggatttgtttgtcgatttttcgaaaaattctaaaaagaacggcttgctttctttagaggtagatggagagcaagtagacaatccttttattcaaaaaggaattcgattaatgttaagcggttacgatgaagatgaattaaaagaagtgttattgaaagatattgaaacggaagtgtatgagttaagaaaaggagcagcattattagataaaattggtgattttgctccagcttggggaatgattggtacgttaatcggtcttatcattatgctccaaaacttacaagatacatcgcaaattggtacaggaatggcagttgcgatgttaacgacattatatgggtctgtacttgcgaatatgattgcaatccctcttgcggaaaaagtatatcgtggtattgaagatttatatacagagaagaagtttgtaatagaagcaatttcagaattgtatcgtggacaaatcccttctaaattaaagttgaaactggatacatacgtatacgaaacaaaggtaaaaaaggtaaaaggagcagcctaatatttcaaggagtggtatgatgagtaaaggaccgcaaaagggatcgcctcgttggatgacgacttttacagatttaacgatgttattattaactttctttgtattactagttgctacatcaaagcaagatgcagtaaaattgtcaaagatgcttgaaaagtttagtgatacggggcaagtagatgcaaaagtaatggaaaatacaataccggatatttcacatgaaaaaaatgatgaaaaaatgatttcaaaaaagagaatggatgaattatataagaagttaaaagcatatgtagataataatggtattagtcaagtgaatgtatatcgagaggatacaggggtaagcgtcgttatagtagataatttaatatttgatacaggcgatgcgaacgttaagcccgaagcgaaagggataataagtcaattagttggattttttcaatccgtacctaacccaattgttgtagagggacatacagatagtagacctattcataacgagaaattcccttctaattgggagttatcttcagcacgagcggcaaatatgattcaccatttaattgaagtgtataatgtggacgataaaaggctagctgcggtaggatatgcagacacaaagccaattgtaccaaatgattcaccgcaaaactgggaaaaaaaccgtcgcgttgttatttatataaaagagtagtatattattattttaataataaaataataaaaacacgaaaattcttttaaaaaaatattaaattttatcattttattttgtataatgagtgagaatgataaggtgaaatattaagatatatttatacatagaaggagagaattaaaaagaatggcacataaaattttagtagtagacgatgcgatgtttatgcgaacgatgattaaaaacttattaaaaagtaatgctgaatttgaagttattggcgaagcagagaatggggtagaagcaattcaaaagtataaagaacttcaacctgatattgtaacattagatattactatgccagaaatggacgggcttgaagcattaaaagaaattattaaaattgattcaagtgcaaaggttgttatttgttctgcaatgggacaacaaggtatggtattagatgcaattaagggcggggcaaaagactttattgtaaagccattccaagcggatcgtgtaattgaagctttaacaaaagtagcaaatagttaatatagaaggggtgccacaaggaatcaaaacagtgatagcggatcgacgtgtggcccccttttttctcattgtaaaacactaaattgttatacataaatgaaatgtttgttagacaggtaggggataaaaatgcaaacagatctattaaatatatttttcgaagagtcagaagaacatttacagtcgctaaatgaaaatgtgctagtgttagaacaaaatcctgctgatatggatgttgtaggagaaatattccgatccgctcatacattcaaaggtatgtctgcgagcatggaatttacggaaatggctgatttaacgcataagatggaaaatgtgttagatgaaattcgtcatggaaatatagttgtaaatgcggatattattgatgtgatttttgagtgcattgataatttggagaagatggttgcagatgtgcaacaaggtggaatgggcaatattgatgtagcctcaactaaacagaaattagaagcattattgaacggcaatgtagaaactcctacggaacatatagagcaaaatcatatagacacggatgatgcagtttcgcatgaagtgcatataacagttgaacagcaagcaattttaaaagcggtacgtgctattatgtgtattgaagcattgcaaaatgtagggaatatacaaaaaacagctccgagtattgaagaaattgaagcagatgctttcggatttgaatttacagtatttatggatactgattgtagtatagaagaattgaaacaagtagtacttcatgtttctgaaattgagaaagtggaagtaaagcaaggagaacctatatcgaaggaagtagcttctaaaaaagtcgttacacaagaagttgtgcaagtagaaggaaagctacaaccagctgtggctacgcaggtagaatcaccaatagagccaacgaatcaaccttcaagtgctatgccagctaaaagtactacaaaaacgaaaaatgctaaagtggagaatcgttcaattcgtgttcaattagagaaaatcgaaagattaatgaatatgtttgaagaaagtgtaattgaacgtgggcgcattgatgaattggctcaaacgattcaaaacaaggagctaattgaacatttaaatcgattaggcgatatttcaaaagatattcaaaatgtactattaaatatgcgtatggtgccgattgaaactgtgttcaatcgtttcccgcgtatggtacgtatgttagcgaaagatttagggaaaaaaatcgatttacaaattacaggtgaagatactgaagtagataaaattgttattgatgaaatcggtgatccgctcgttcatttaattcgaaatgcaatcgatcacggtgttgaaactgttgaaaaacgacgtgatgcaggtaaaaatgagacaggtacgattaaattagaagcctttcatagtggaaatcatgtcgttattcaaattacggatgatggaaacggtattaataaagggaaagtattagaaaaagcgattaaaaatggcgttgtaactgaagcagatgcgaatagattaacagatcgtgaagtgtttgatcttattttccaaccgggatttagtacagctgaagttgtatcagatctttcaggacgcggtgtcggattagatgttgtaaaacatacgattcatagtttaggtggacatttaattattgattctgaggaaggaaagggaagtacatttagaattgaacttccattaacgttatctattattcaatctatgcttgttcaaacgaatgataagcgttatgctttacctcttggaaatatcgttgaagcaattcgaattaagagagaagacatccaatccttacaaggaaaagatgtattaaattatcgtaatcaaattattgaagtgaaacatttaagtactgtatttggtgaaaaaacagtagatgaggcgtttgcgtcatatgatggtcaaatggttcctgtgttaattgttcgtaacacacatcgcagctatggacttattgtaaacacaattatcggtcaaagagaaatagtcttaaagtcattaggtgacttctttgcagagagttctaactatttctctggtgcgacgattctcggtgatggacgagtgatcctcattttaaacccagaaggtttataataggaatgaaggaaagctccccacttgtatacaattggggagctttttggctaatcgttacgaatctaataatgggatacatagtaacgttttatactaatgagtttgctaaaataaaataagagtttatattatttgatagaaaaacagaaatgaggaggcagggaaaatgcctgagcaacacacaaaaggggatacgagcacgattgtgctagaaaaagaaaatgagcatttaacgccccaagaatgcgatattcttggcgaaattgcaaatatatcatttggttcagcttcgactgtattatcaacaattttaaataggcaagtaagcattactgctcctcgtatagagttggtagatttatatgattcaagagatgtcgaagttccacatgttgtattaaacattcattttacaaaaggattagatatggaaaaccttcttgttcttaagcaagatgttgcattgtccattgctgatttaatgatgatgggaacaggtgaagtcgaggacggaaaagaacttggtgaattagagctaagtgctgtacaagaagcgatgaatcaaatgatgggattcgcagctacatctatgtccgaattcttccaagatacagtagatatgtctccgccgacgattaaagttgtaaagttatcagaagaaatggagaaaatctctgaaatcgatgggaatcatacgattgttaaagtatcgtttgatttaaagatagataatcttgtaaactctaaacttgtacaaattgtttcagttgagcatgcgaaacaaatggtaaataaattaatgcaattatctggtggagtagaagaaacagacgaaccagcagaagtagtggaaactgagattgtagaagaaaaaattgaaaaagagcatttaacacaagaagagaaagatgttcttggtgaaattgcaaatatttcaattggttccgcttcaacagtattgtcaacacttttaaatcagccagtttcaattagtacaccaaatgtagaagcaatcaatgttcgtcattatgatggagtaccagtaccatttgttattttaaatgtcgactttgttgaagggctaaagaatgagaatgtatttgtatttacgaaagatgttgccttaacaatggtagatttaatgatgatgggaacaggggaagttgacccagaaaaagagcttactgaattagaactgagcggtattaaagaaattatgaaccaaatgatgggtcatgctgctacggcgatgtcagaaatgtttcaagaaaaaatggacatgacgccgccaaatgttaaatttgtaacgttaaaagaagaaatggaatatttgggagagtcaatggaagtggacgaactcgttcaaattacgttcaatcttgaaattggcgatttgcttcaatcgaagatgtatcaaattttgccaatttccgaagcgaaagaaatggtaaggcgacttctgtatccgatggtggaagaagaagagattgccacagaagaaattgaagaagaaaaaattgtagaaccagttgtgcaacctattgaatttaaagaagtaaaacaaatggaaccagtatatatggacacgtccattctacaaaatgtagaaatgaacgtgaaatttgtatttggaagtacagtgaaaacgattcaagatatattaagtttacaagaaaatgaagcagttgtactagatgaggatattgatgaaccgattcgtatttatgtaaatgatgtattagtggcgtatggtgaacttgtaaatgtagatggattttttggagtaaaagtgacgaaatcactataaggcattgaaataggagtttgaactagtagatgaaaaacgtaaagttttttctaatgagttggctatgcatacatgtgtgcttgttcttccccttgcaaagtcaggctgaggaacaaattgagtcagatcaaaaaataaatgaagtgaatgtacaagaagaaaataaggaatctcaagaatcgtcagaacaagtggaaacgaagcaagatgaagagaaacaaaaagaagcagagcaacaagaagtagtaaataaacaattgaatgaaagaaagatagaaacagaacaaggaattattacagtaaataagccggagcttaaagttggcgaagaagtgcgaattgctgtagaaccaaatgtgaaaaacattcaaagcatgaaaggtatattgcagttacaaaaaaatggcgagcaatatgcgcaagaaagaatactatcttttgagtatgatgaagaaacgaagatctgggttgctaactataaagcaggggattttgatttgcaaggtgattggaatcttcagctcgttcaaagttacaaagagaatgagaaagaagagctcataaaaaatgaagtgaaagtcccgctcattcgtattaaaaatgaaacgccaactatagataaagaattgccaaagttacagaaagttactattgatgaagtaaaagagaacttagttgaacgaaaacagggagattctatacatatacgagtaaaagcgtcagatatagaatcggttgtaaaagaagtgcgcgttacattaaaagggaaagaaaataaagagctttcgtttttattagactacaacaagcatgatatggattggcaaaaagtatttgaaataacagaagcattgccggctggatcatacgaattacttgtagagataatagatgcagcaggtaataaacttgttgaagaaagtgaatataccatttctgttttggcgccaaaaaacgaagatgataaaaagatagaagagaaagaagataaattagataataaactagaaaatgaattagaagataagaaagaaaatgagaagcaagaagatttgaaaatcaaaaacccgcttccagaagaaaaattgccagttgttcaaattccgaagcaagatgagaaagtaaataagtttataaaagaaccgttgaaagagaaagaggaatttacttacgttataaaagagccgttcgaagacaacaaggaagtacataaggcgaaggaccaaaaagagaaaaataacaaacaagttgtctctaaaaagaaagaacaaaaagaagaaacgaaagacaaggaagaagaaaaaggtgaacagggagtacaagcttcggatgtatttactatcatgtcaggtttattcgtactgtttttagttttaaagagtaataaagaatggggctaattatttcatagtagtggaggcgcttaaatggagattaaacgtacgacaattgaagataagacgctacaaccattaaaacagcctgcagctatttcggaacatgaaatccagaaagaacgaaagcgtagcaatttagtgtttactggacagtctaaaattatttcgaaaaataatgaaataggtattttacttgcaagtttaagtgatggaaagattatgaaggaaatactttctaaagagatggatacggtgttacaactttttaaaaagttacatacattatctcaagaaggaaagcaatcagaaaaagtgtttgaacaagtaattagaagcctacaaggacttattaagcaggcgcacataaaagaacttcctttgttagatggaacatatgatttcgctgaagtacaactatcatttggtagaaaagtacatattcctttactagatgtaagtgcactcatctctagagtggaaagtgattcctcagaaggaaatataaatttgatggtaacggttattactgcttatataacgaaattgtctaacgaaacgattttaattagcgttacagaccgcattgctaaagatcgggatgtaagtgtatggagagcgcttgcggaaatgaacatgacacaattatcacaggcattgaaacaaacgatgcaagaacataaatggtctatgacgtttctttttctcttcatatggattgtcggtattattttaattcgagttatgtaaaagaggtcgtcactccattgtgacgacctcttttatattttttcgtagaagaatgtatcaaatcgctgaagattgtaacgttcgggtgttaaaatttgttccgtactaccaacaaatagtacaccgccttttcgtaaagaacgactaaatttttcgtaaagttttattcttgcttcttctgtgaaatatatcattacattacgacaaataatcaaatcataatttgtatcgaatgactgcattaaaaggtcgtgttgtttaaacgagacgttttgtttaatgttttgatgcaatgaatatagatcattctcttttgtgaaatgacgttctttcaaatcagtaggtaattcctttaacgaacgttctgtatattgagcgcgttttgcggtttctaaaatatgaaaatcaagatctgttgcttgaatttcaaaacgaaatggagctagatgttttgataaaattaaagagagtgtatatggttcttcaccagcagcgcaagcggcactccatacctttaattttccgctattttgttcgagtaattttggtagtgctttcgactctaaagtttgccatcgttctttatttctaaaaaactctgaaacgttaattgtaatatagtcaataaaatttaaaaataaattttgatcagcgcgtaatttgtttaaaaaattagtgtagttttcgaagccttttctcgaaatgaaagcatcgattctacggcgcattctatcttgtttatatgaagcgatgtccatattgaattgttgtttaaaactcgctataaaatgatcgtaatcttgttcaattatcatatttacaatgggcacaataatgatattgtgcctccccctttacatcatacgaattttttgttcaaagctttttttcgtttgcttttcatgtaatcctggtaaatcataaatgacagcatcaatacctgcttcttttgcaacatcgacagggatgacagatgtatgtttgtcaccattataaaaacagagaactaaatcagtgtcttcaataatttgtttaacaaaaaacatataatctgatcggtaaatggagtcagaaggatgatcaaaagcaacatattcggctccgtgtttttttaagtaatcaacgacttcttgaaattcatctgttattgcttgcaatggttgcagcgtgtaaaggcataaattttgagcgagtctttcattctcaacgaaaaaacgaagaacctcattttcaatagatttataacataatatgtaaattttatgtttgtgagcatagtcagttaaaaattttttaatttcttcttgatctaatgctgttaattgatttgaaccacaaaggaaaatattcatagaattgtgccacctcatgctaaattgtaacatatcttttataaaaaataactgcaaaatattactgttcagagtataattataaataactggattttacgattaagtttaggaagaaataaaaaaaataaataggtgatatatatgctacgttctatctcgcataatccaattttatcgcatataccgcctgctactcaaatgccgaaagaagcaaatgtcaggacaggacttgcattttcggataatttgcatgcagatccgaaaaaagataaattactagaacaaatggaagcgtttgtcgataatattggagaaattaaagagaaaattgaaatggaattaacgcttgataatgtaatggaatacaaaaatacagtaaaatcatttttgaatttttacgtggataatgtattgcagtataaagatgtcatgtctcgtcacccgcgttacggatattcacagaaaatgacgattgtgaaacaggcagaaatgggattgaatgaattagaagatgttatgaatttaattaatacgaaaacaggacatttagaaatgttaaatcaaattggagaaatccatggtttaattgtgaatttagtcttgtaaaaggaaggaagctatatgtacatacaattatatgaaaaactcgttattattcaaaaagcgtatgaaaatattcaagcgcttggagagcaaatatatgagaatttaaaaaataaaaatgtaaatgcagttcaaaagttgcaagtagagcaattgcagtacattgatggtttaaaagggttatcaagctcatttgaagaaatggttgttcagttctgcaaagaacaaggggttgaatcgtttcgtgtaagtgcgttattttcgtatttttctcaagaagaaattgaaaaaatggaagaattacaaaaaaacgtaactgaattagaagagaatgtaaaaatgattcttttgaaaaatcaatattacttaaacgtactattaaaaactacagaaagtattgtggattctgtttctgaatataacttagagcgaaacaataattcgcaaatctttatgaatgaactattgtaaaggagaagtgaagctttatgagattatctgattataatacaccgctatcgggtatgttagcggctcaaatggggttacaaacaacgaaacaaaacttgtctaacattcatacaccgggttatgttcgtcaaatggtgaattacggatctgctggaggaagtaaagggtatgcaccagaacaaagaatagggtatggtgtacaaacgttaggtgttgatcgtattacagatgaagtgaagacaaagcaatataatgatcaaatgtcacagttctcttactatgcatatatgaattctactttgtcgcgagtagagtctatggtaggaacgacaggtaaaaattcattatctagtttaatggatgggtttttcaatgcttttcgtgaagttgcaaaaaatccggagcaatcaaattactacgatacattaattgctgaaacggggaagttcacaagtcaagtaagtcgtcttgcgaaaaacttagatacagtggaagcacagacgacagaagatattgaagcgcatgttaatgaatttaatcgacttgctgctagtttagcagaagcgaatcataaaattgggcaagcaggtacacaagtaccaaatcaactattagatgaacgtgatcgtattatgacagaaatgtctaagtatgcagatatagaagtatcgtatgaagctacaaatcctaatattgcaagtgttaggatgaatggtgttttaactgtaaatggtcaagatacatacccacttcaattacagaaggataaaaagccaatgtctgtacaaatatctggaacagatatcccattaagtggtggaacaattttatcggcaattgatacgaaagcaaagattacaaattataaagataatctgaatgagtttgtaaattcgttaaaaaaacaagtgaataatactatgaagaaagagttttttgtaggagaagatgcgaagaagcttgaattgaatcctgattttataaaagatatttcaaaaatgaaaatttcggctgaaactgccaacaaccttgcggctattacagataaaggctataaggatggacttacatataagcaagccttagatcaatttttagttggtgtagcctctgataaaagttcagtaaatgcatatcaaaatattcataaggatttattagaaggtatccagcaagaaaagatgagcatcgagggcgtaaatatggaagaagaaatggttaatttaatggccttccagaagtacttcgtggcgaattctaaagctataactactatgaatgaagtgtttgatagtttgttttcgattattagataaggagtagtcatgtatagttggtaattggaaatatttaaggaggagatagaaatgagagtatctacatttcaaaatgcaaactgggcaaagaatcagttgatggatttaaatgtgcaacagcaataccaccgaaatcaagtaacctcagggaagaaaaaccttcttatgagtgaagatccacttgcagcaagtaaatcatttgcgattcaacattcattggcaaatatggagcaaatgcagaaagatatagcggattcaaaaaatgtattaacacaaactgaaaatactttacaaggtgttttgaaatctttaacaagagcagaccaattaacagtacaagcattaaatgggacaaatagtgaaaaagaattgcaggctattggtgtagagattgatcaaattttaaaacaggtcgtctatttagcgaatacaaaagaacaaggtcgttatattttcggtggtgatagtgcaaaaaatccgccatttacagaagatggtacgtaccaaggtggaaaaaatgatgtgaactggcaattaaatgacggttatgaattcaaagcgttccgtaacggagaagcattattatccccggttataaaaacgttaaaacagatgagtgaagcgatgaaaaacggtgaccaaaaagcattaaaaccgttattggaaggaaataagcaaaacttagatggcatcattaaccgtacaactgaagttggttcgacaatgaacacaatggagacgtttaaaacaattttaaacgagcaaaatgtagcacttcaagaaaaccgtaaagaaattgaggatgttgatttagctgtcgcaatttctgatttagcttatataaacgcaacatacgaagcaacattaaaagctgttagtacgatgagtaaaacgagtattttagattacatgtaaatgataaggagtgaaaaatatggcagggacaatatctaattatggtgacagacagcaaatatggaatttaggaaataacataatagatacaaagaagttagtagatttagagttacaagcattggaaatgaaaaaatcaccatacactacacaaaaacaaacgttaacaaatgaaaacaaagtttatgcgagcatgaaaaaagagtttgcaaattttgtgcaagtattcaaagatttaaacacatttaaaggtgatgaaaagaaaacaactttatccaaagatggttttatgacagcacaggcggatgctgctgcaattcctggaacatatacaattacagtagagcgagtagcagaaaggcatcaaataactacagctccacttactcccccaaaaactcctgaaggtacggagcaaaagtttagtttagatttaaaacttggagtagatgatgtatttcagataaatggaaaagaagttaaaatctcaaaagatatgacgtataaagatcttgtcaataagataaataatgggaattatggtgcatcagtatacacattaggggatcaactatttttcacatcgactactgcaggagaaactggagagctgaaattaacggatggcgccaatggttttttacaaaatatagggttagttacttctgcgaaaaatccggatggaacgaatgttgttgcacatcaagtgacaggagcgataaatgctgagtatacaataaacggaattaaaggaactagtaaaacaaataagattgatacaattccaggattaactattaacttagaaaaggtaactacagagccaattaaattaactatcgaagattcagatataaaaaattcgatagatttaatcaaaaaaatgaaagatgagtataataacgctgttaaaagtttagatttattttctggtgaaaatggagtaatgcaagggaataatgtttcatttgctatcagtaatgcaatgacaagcatttttaaattttcacaagatgataagtatttattttcttttggaattcaaattgataaaacaggaaatatgactcttgatgaagaaaaattgaaaatagcttttaaagagaatccagaatctacaaaacaatttttctttggctttaatggtattggtcatgatatagataaaaagcttgagggaatctttggagatgaagggattatcggaaaacgctctaaaagtattgaaaagcaagtgactgatttagagagaaaaattcaagatattgatacaattaataagaaaaaacaagaatcaattattgataaatatgcaaagttggaaagccagctagcattgcttgatagtcagctgcagacaatcaaagcaatgacaaaaaccaaaagtgatgattaatgaaagttgaggaagtgattatatgcaagcatggcaacgttatatgcaaaatgatattatgacgagtaatccgattaaaaatacaatatttatttatgaaagatgtatcgtagagtttcgtaaattagaagaacttttaaatacatttaaacttcaagaaggagacgaccttcttgaaaagttagaacgtatatttgaagagttgaagcttcaattaaatcctgatatttcaaaagatttatatgacggtctatttggtttatacgattggattagcattcaaattcaaacgatgaaagtaacgcgtgaagcaaaagacattgatgcgattgtacaagtgttacaagatttaatagacggttaccgtggagcacttgaaaatgaacaatgatatttatcgaacgtttgtcagctgttttaatgaaatcggtgaattacaagtgtcagatgaagagtttgctgagaagagtgagatgttaaatcgttggatgatgacactagatgaagaaagacgtgcacaagttgcagcagaagtaagcccattcattattaaggcagcgcagcatattcgtgataagcaaaagattttggaagaaatgattatggaaaatgatgggcgaatgaaggctaattcattttacggtaaatattaataataacgtctggaaacagattccccttttaaaagggggtctattccttcgtttacataaagaactccgctgattgaggtttcattttatgactgtgatgaaataataattgtaatctaaataatagaaaaatggactttagtttgtagtttatatattgaaatgttctatagattactatgtgtatacagttttttgcattctttttctatatttttgtatttttctaaagacaacaatgaaaaaatggaataaaatatgtaagggtacataatagtaaatattttaataaacgcatataagaaaataaataatgaagtgaaacttctatcagtggatcattacgttagaaaaggaagggtgtggaatatgccagatttagtgagtgatgtaagccattatatgaattatttagtgacgaaacgaaatactgtttctagtaatattgcaaatgcgaatacacctggctataaagcacaagatgtaacatttgctgagcagatgaataaaagtagtgcgttatataaaaataatgcggctgatttaaagagcaatccagatttatatcaaacgaatgaaatgcacttaccgacagtaaatacgaaaaatacatatgcaaagattcaaacaaaatcaatgcaaacgaataaagacggaaatagtgtggatgtaacgacagaaatgctagatttaatgaaagcaaatcagttatacggtatttcaattaacgcaattaatacacaatatgcaattaaccaagcggcacgcggacgttaaaagtagaaggagagacaacggatgtttcaggcaattaatgcaagtggctcagggctaacgacagcgagaaagtggatggaagttacttctaacaatattgtaaatgcgaatacgacggcggctccgggggcagatttatatgagcgtcgtagtgtggtgctagaatcaaacaatagttttgcaagtatgttagatggggctcctactaatggagtaaaaataaaaagtattgaagcagacaaaacggaaaatttagtgtatgatccgacgcatccgcacgcaaatgaagaaggatatgtacgttatcccaatattgatgtaactgctgaaatgacgaatgtaatggttgctcaaaaaatgtatgaagcgaatacgagtgtattaaatgcaaataaaaaaatgcttgataaagatttagaaatcggccgaggataagggggaagataataatatgaaaatccaaccaatgttacatacacaaccatttggagcaattcagtcaattggtgcaccgaagacttctcaaacacctgtagttgaggggaaaaagtttattgatttattggaagatatgaatcaaacgcaaaacaatgcgcaaacagcagtatatgatttactaactaaaggggtaggagaaacacatgacgttttaattcagcaaaagaaagctgaatctcaaatgaaaacggctgctctcgtacgtgataatcttattgaaaattataagtcactaattaatatgcaaatttaggaaagtggacgggtgtgtttaaatggaaaagatgaaaaatgttatccaatcgttaaaaacatggcataagttagtaatcggtgctgcgcttttagcgattgtaacaggagcacttttatacttcaccttgccagataaatatgttgttgtatatcaaaatttaaatgatgcagataaacaagagattacagcagaattatcgaagttaggtgtcgattatcaattagcggccgatggttcgattcgtgtgcaaaagaatgatgctccatgggttcgaaaagaaatgaatgggatgggcttaccgtttaattcgaaaagcggtgaagaaattttattagaaagctcgctcggttcaagtgagcaagataaaaaaatgaagcaaattgtcggtacgaagaagcaattggagcaagatattgtaagaaactttgcgacagttgaaacggcaaatgttcaaattacattgcctgaaaaagagacaatttttgatgaagaaaaagcaaaaggaacagcggcgattacggttggagtgaagcgtggacaattgttaacagctgatcaagttgcaggtatacagcaaatgattagtgcagcggttcctggtgtgaaagcagaagaagtaagtgttattgatagtaaaaaaggtgttatctcaaaaggagcagatgaagcacattctagtagttcctcttcttatgagaaagaagttgagatgcagcaccaacttgaaggtaaattaaagcaagacattgatgcaacattaatgacgatgtttaaaccgaatgaatataaagtgaatacgaaagtatctgtaaactacgatgaagttacacgtcagtcagagaagtatggtgataaaggtgtacttcgtagtaaacaagagcaagaggaaagctctactgcgcaagaaggggcagatacgaagcaaggtgctggtattacagcgaacggtgaagtgccaaactacggtacgaacaataatcaaaatggtaaagttgtctatgataataaaaatggtaacaaaatcgaaaactatgaaatagataaaacagttgaaacaattaagaaacacccagaattaacgaaaacaaatgttgttgtatgggtagataatgatacgctagtaaaacgtaaaattgatatgacaacttttaaagaagcaatcggaacagcggcaggacttcaagctgatccgaacggtaactttataaatggtcaagttaacgttgtaactgttcagttcgatcagccgaaagccgaaaaagagaaagagccagaaaaaagtggtatgaactggtggttattcggtggaattacagctggcttattagcgattggtggcctagtatggttcttattagcaagacgtaagagaaagaaagaagaagaggaatatgaagaatacttagtagaagaggaaattgctgcaagtaatgaaagtatcttggaaattcctgaagaaaaaatagtgccagagccaaaacctgaaccagaagaaccgaaagaaccaacgttagatgaacaagtgcaggatgctacgaaagaacatgtagaaggaactgcaaaagtaattaaaaaatggttaaacggacagtaagggaggaacaacgatgttagatgaaatctcctccaaagaaaaagctgccatccttattcgtacattagaagaaggggtggcagcaaaagtcattgaatatatgacagctgaggaaaaagaagtattacttcgtgaaatcgcaaagtttcgtgtatacaaaccagaaacgttagaaaatgtactaggagagttcttatatgaactaaatgtaaaagaattgaacttagtcactccagataaagaatacattcgtcgcatatttaaaaacatgccagaagacgaactggaaaaattattggaagatctttggtataacaaagataatccgtttgagttcttaaattcacttacagatttagagccacttcttacagtgcttaatgatgagtcaccacaaacaattgcaattatcgcttcttatattaaaccgcaacttgcgtctcaattaattgagagattgccagatcataagcgcgttgaaacggtaatgggtatagcgaaactagaacaagttgatggtgagttaattaatcaaattggtgagttgttaaaatcgaaattaaataatatggcatttagtgcaattaataaaactgatggcttgaaaacaatcgtaaatattttaaataatgtttcacgaggtgttgaaaaaacagtctttcaaaagctggatgaagtcgattatgagttatctgagaaaattaaagaaaatatgtttgtctttgaagacttacttggtcttgaagatcttgcgcttcgccgtgtattagaagaaattacagataacggtgttcttgcgaaagcacttaaaattgcaaaagaagaaattaaagagaaattatttacatgtatgtcttcaaaccgtaaagagatgattctagaagaattagatggcttaggaccgcttaagatgacggatgctgaaaaagcgcagcaaacgatcactggtacagtgaaaaagctagagaaagaaggaagaattatcgttcaaagaggtgaagaggatgtccttatttaaaaacagaattccgaagaattctgtttctttttctgaagaaacgtatgaattacaatttccaaaaccagcttcaattcaaatagaagaggaagaattacaagctgatcatgcagaacttcgcgcccagcaagaatcgttacatatggaaatgaatcagctaaggcaagagaagcaaatgctagaacgagagcggcagcagttattacaagataaagaacaatttcaaatgcatattcatgagcaactggaacagatggaagcagcgcgtgtgcaatttcaaaaagaacaacaagaaacagcgtatgaatggacagagttattatgggatcaatcttttcatctagcagaaaaaatcgtgaatcaagcggtagattcacgattgcttgatgtgttacctattttaactggcatcgtgcaaacattgccaacttcgtttgaaaaattaatcattacagtacatccagaaacgtttgaacgtattcaagaagagaaggaaaatacgaaagaatattggttactacaattagtagaatggaaatatgatttctccctgcagtttggtgaatttgttctggaagaagagaaagagttctttaaatttaaatttgcacctatatttgcgaaacttcgtcagaaatgggaagaagagaagttatttgaggagcaaaatgtatgagccgcctgttaatgaatgagaacgaaaaatggaataagttcattgaaacaccgctgtatacgaaagtaggcaaagttcatagtgtacaagaacagtttttcgtagcaaaagggccgaaagcgaagattggtgatgtttgcttcgttggagaacataacgtcttatgtgaagtgattgccattgaaaaggaaaataatatgctacttccatttgaacagacagaaaaagtatgttatggagattcagtgacattagtttcagaagatgttgttgtaccacgtggtaatcacttgctcggaaaagtgttaagtgcaaatggtgaagtgttaaatgaggaagctgaaaacattccattacagaaaataaaactagatgcaccacctatacatgcatttgaacgtgaagagattaccgatgtatttgaaacaggaataaaatcaattgattctatgctaacaattggtatcggtcaaaagattggtatttttgctgggtcaggtgttggtaaatcaactttacttggaatgatagcaaaaaatgcaaaagctgatataaacgttattagtttagtaggggaacgtggccgggaagtaaaagactttattcgaaaagagttaggcgaggaaggtatgcgaaaaagcgtcgttgttgtagcgacgtcagatgaaagtcatcttatgcaacttcgtgcagcgaaactcgcaacgtctattgctgaatacttccgtgatcaaggtaataacgtattacttatgatggactctgttactcgttttgccgatgcacgaagaagtgttgatattgctgttaaagagttaccgattggtggtaaaacactgttaatggaaagttatatgaagaagttgttagagcggtccggaaaaacacaaaagggatctataacaggtatttatacggtgcttgttgatggggatgatttaaatggtcctgtaccagatttagcacgtggtattttagatggacatatcgtattaaagcgtgagcttgcaacgcttagtcattaccctgcaatttcagtattagattcagtaagtaggattatggaagaaattgtttcgccacatcattggcagcttgcaaatgaaatgagaaagattttatcaatttataaagaaaatgaattgtattttaagctaggaacgattcaagaaaatgaagaaaatgcttatatttttgaatgtaaaaataaagtagaaggcataaatacatttttaaagcaaggtcgatcggatagtttccaatttgatgatatcgttgaagcgatacagcatatagtataaggcctctgcataagaggtcttatttttttgttttttaatatttcacagatttttttggaaaaaaactatataatagaaaaagagaacgttataatagaaaggggttatgaaaacaggtggataaacagcagtacgacacaataaaattgcaaataaatcaagaaaaagaacatattttaaaagaagtgtatgaattaacagctgaaaaaagaaaaatagaacaaaaaaaagaatatgatttatatgttgtgaaatcgcgtagtaaagtcgtacaaactgggcaacgtattatggctggtatgctttcttcacatacgttttcacctgaaagaatagaagaatggaatcggaaaattaaaaaaacggaaggttttattcaaaaaaatgaaagtcttttagagcaagtaaaagaaaaagaacgtgtcattgatgagatgtatcaagaagattgcaaaaagcttgcgaaagcacaagaaaagctggaagaaaaaatgcttctggatttgaaaatgtgtatgaatggatgaggtgaatgtagtgatacagtctgtattaccggtgcaacaaagtttacctccgcaaaaagaaaaagggctagaagtacaatcgaaaaatgaagattcttcatttgatcgtacgatgagaatggaaaataaaaagcagccgaaaacggagaaaacgaaacgagaagaagcaccaaaagaagagaaaaaagaatataacctttctaaaccatcggtaacgaaagaagaaccaattgtaaagaaagaagaaaaaaaagagacagaacagttgttattagctgtatctgagcaaatggttgcaattgagcaattacatgtgcagccggaattgttatatcaatacatacaaaaaatacaagagctatataaagaatatggcaatattaaacttaatgaattacctgcagctgaattacaacaattacaagaacttctttcaaatatgaatatcaaaaatgctatatgtttagaagatacaatgcaaatggtattagacaaaatgaagatgccagagcaaacgatgcaagcattgaaggttgtagaaacagaaacttgtaatattgcaaagaaacaagaagaatttaaagacgtagatcttccgaaagctgagaacgatggtgcaaaggtagagttgccagaaggtgatgcattaaacgattcgagctctgcaggtgcagagttattaaataaaacgacgagtaccgaacaaatagggaaatcaaatagtggtgctgagaaagtttcattgcctgacttaggaaagaaaatggaagcgcaagtagaagccttgcaaaaatttgtagtgaaacaagaacgtgttttatttcagttaaatccagaaaaatttggtacgttaactgtgtttatgaaaaagcatggagaccaaattgatgttcacgtagaaatggaaaaacacgatgcgaaaaaacgtgttgaagtcatttttgatgaattgaggctaaagttaaaagaaaaagaaattaacattcaaattagctattctgataaagatgaaaaccgtaaagaacagcgagaacaagaacaaaggcaaaagcagaaattagcaagtacgcaacatgagaaacaacaatcaaaagaatttgcgggattattggaggaataaagtgtgccaacagttggattaaatacaacgagtacaaatcatattccgttacaagtaggggcgcaagcaaaaaatgcatctgttaatggtgtgcaatcgccagttcaacaaacaaacggagtatcagcaagtaatcaaaaaacacccggtattatggataaagatgatttcctgaaactttttttagcaagctttcaacatcaagacccgtttaatgcgatggatatgaaccaaatgatgaatcaaacggctcaactatcgcttatggagcaagtacaaaatatgacaaaagcagtagataaactacaatcaacgatgtatacgacagctcttgatggagggatgaaatttttaggaaagtatgttagaggtataaacaataagggagagcaagtgactggtcaagtggaaactgttcgacttgccgaaaataacgatgtacaacttattgttgataatcaagttgtctcacttcgttttgtagaaagggtttcagataaaccgatagcagaaacaaatccagaagatgagaagaaagatgatatagaaaaaaatgaagaggttaagcaaaattaataaaaattaataaaaattaataaaaggagtgtatataggttatgattaaagcgttatatacaagtattacagggatgaatgcggcacaaaatgcattaagtgttacttcaaataatattgcaaatgcacaaacagttggatataaaaagcaaaaagctatttttgatgatctgctatataataatacggttggttcacgtggggatggtgcttatgctggcacgaatccaaagagtattggtaacggtgtaaagtttagtgggacatcaacagattttagtgatggttctcttactttaactagtgataagatggagacagccatagagggaaatggtttatttttagttggcgatcgtaatagtggaaatgtagagtatacgagaaaagggtctttcggtgtatcgaaagataactatgttacaaatacaagtggacagtatgtgctaggttatggtgtgaaaacaggaacacaagaaatagatttttcttcacgaccaagtccaattcatattccaatgggatcagctgttggtgggattcaaacagataaagcaacaataggtggaaaccttcctagaaatcaaaatgcattatctcacgaattcacagtttttgatgaggaaggaaactcgttaacgttacgtgtaaatattaaacaaaagactacaaaagagactgtagatggaaaagaagttgaaaagcctgtgccaggtgaatatacatatacagtttctgtaagaaatgattctaaaaacgaaaaagagtttaagcctgttgaaggcatgacgggcgaaaaaaatcttaaatttgatacattaggaaatctaaaagaaacagatgaatctgtacaaaaaaatccagtaactggtgaaattactaaaggtggaacagttaaaattccttttggtaagggactgacactggacttaagtggtttaacaaattatccgacagggaaaactatttctacaacagaagtaacggggcgtccagctgcaattgcaaatgactattcaatttctgacggtggtttcgttatgatgacatattcggatggtagtatgaaggttgtaggacaactagctgtagctacattccctaattcaggtggattaatgaaaactgggaatggcaattacattgccacaccatcagcagggattccagggataggtgttgccggtgagaatggtgcaggtaatgtaagggggtcagcaaaagaaagttcaaacgtagatttatctgcagaattcgttgacttaatgctatatcaacgtggattccaaggaaatgcgaaagtaattaaagtttcagatgaagtattaaatgaagttgtaaatttaattcgataatatattataaagaaagattgtaatgtagtagaaagggtttttattcgtatgacaagacaagaacgaattttacaattgccatttttcgagaataaacgtgaacttgctgaacaagtactaaaaatggaacgagaagagcatatatatttaccagatcaatttgaaattaagcaagtgcccccgtattcatttgctgaaaagaaagcgattattggtcgtattcatgagttttatttcgtcagtgttggcagtgatggcgcatggaagtatcaactgtttaaggacgagatgaagtgccgtgagttttttattacattatcaggcattacggatcagcaaattgcgttttggttcaacaatatcgagttgcttaaaggcgcttaaaagtgtttttaggcttaggtggctcggagctgtaagaagagaactataaaaatgtactggagtggttgaacaataatctctttatagcaagtcagtactttttatagtctgtgagttgtgacaatagggcaatgaaatgagagtatgctagtttcatttcatatgtttgtgatgatagatttttataaaaggagaggtgaggaggatggcgcaaaataagtatcgcgttacattcatttcgccgagtgaggttgagcagcggactgtaatggcggcgaatagtttgccagatttaattcgtaaagtagagagtattattgcagatccaaacggttattttgtaaatgataaaaaaaataattgttattttaaagtgattaaagaaaatgttacgtttattcaatatgagttactattttcggataaggaaattcatattgaaaaattaaaacatatagcaccggtggtattcaaacgattattcgaaaaaataaatgaaccagaactatatgcactcgcactacttgatgttgatatagcaacgaaagaatatgtgctagcagaaatgaattctgagctgagaataagagtagagacggagctttcgaaaaaatgggaagcaatgccgacagaaattgtaggggcgcaagaagtgttattagaagcacttgcttcgtttatacaagattaattgttttttaataaaatgaattgatcgactatctatattttttatataggtagttgactttttctcttttataaagcttaataattagatatacggaattaatggaaggggagcgacacctttatgtcacaagcacaaagtattttattagaaagcggaacaaatgaattagagattgttacgtacactgttggtgaaaacctatttagtattaatgtaatgaaagtacgtgaaatcattaatccattccctgttacaactgtgccagaatctcatcatgcagttgaaggtgttgttcaagtacgtggtgaaattttacctgttattaacttggcaatggctcttaatttaaagtcaacaaagccacttgatcaaacgaaatttatcatctcagaattaaaccaaatgaaagttattttccgcgttgatgaagtgcatcgtattcaacgtatttcgtgggaacaaattgatgaaccagcttcattatctatgggactagaagaaacgacatctggtattgtaaaactagatggcaaaatcatcttactattagattatgaaaaaattgtatgtgaaattagcggtactggttatgacaataaatcaattgcagggttagaacaaaaaacagatcgagctgaaaaagtaatttatattgcagaagattcagcgatgctacgccaaatattagaagaaacattatcatcagctggatatacgaaaatgaacttcttcagcaatggtgcagaagcgttagcgcaaattgaaaaattagcgaaagagcaaggagagaaaatgtttgaacatattcacttgctaattacggatattgaaatgccgaaaatggatggacatcatttaacgaaagtggttaaggatagtgaagtaatgaatcgtttaccagtcattattttctcttcattaattacaaatgaattattccataaaggtgaagctgtaggagcaaatgctcaagtaagtaagccagatattcaagagctaattggtttagttgataagttagtgttgtaagaaaagcacttttttagctggaatagaggaactagctatgtgtggcagcggtcagtgcctaatagagacccatgcgatgtaagaccagagatatggagtgttttttaggtaaatgggacgagatagccgccgagatagctttagaagaagcgagacttcgattgaggatttgaagactgggtttataactctattctgttagagagaggaaggaattagccatgtgtagcattggctaattcctttttagtattctatactttaagctggcagaaaaatgaaaggtttctgaggtgtttggcgctgtatgtatgaaaaatcttcaaatgaagatttttgatttgaaaatataagcaaacgtattttgagggttattttagtaacatttcgtggtaacgcaaattttttcggtgaaaaaacatccaaaataccatataatataattaaatgtaattaatatgcaattttacatattaattaaaaaacattttccaaatttttatactttctatacatttttgtatgtttattatttgacagataatttcgaactgttataatatggatatgtaaaaattgctattttcttaaaagacatgggagtcagatgagaattgtgaaaggatgagggggagtggcacaaattatgtatcaccacacagcaattaatgtattaggtcttttacaaaacatgtcaaataataaaatgaacgatatgcaactagaggcggaattaaaaaaaatagaaaaagaattccaagtaaagtatgaagaattagttgatttacataatagaatggtattattccaaatagatatagaaaaaaatggcgggatgcgagcatatgaaaaatcagcaattacatggctgaagtctgaactagtgctactgtatgaagtgtatcaattttgtcaacgtcacggtttaaacattttaaatatttcaaaatacgtaagtaaaaatgaactaaatctttttccaaaaacagaaagtcaattgcaaaatacgtattataaattaaaaaaacgtgaaataccgtttgaaaatattgaaaaacaaaaaccaggacgaaagcgaaaatatataccagtaaaagagacaatcgttgcaagaaaacaagaaaacgagtacgaattaaaagaagaaatccagcataaagaggatgaaaaaaatcttgtaacagttatatctggtatcgttgataactttgaaacaattaatcaatgtagtgaaaggaaagaagacgaactacatcagtttatggaaggtatttataagctttctagcatggcagcaggacgttctagagaagcaaagaatacacgtagtctagaaggtgaattgcagtcgttacaactagaaaatgaaaggctaaaacgagagaaagaagagcttgtacaagatattaaaggcatgacgcagcttttaattcatttcattacaagttctgatatcgatcaaattcgtaaattaccaactttcgtacaagattgtaaaatggaattacataaactagggctatataatgcacaagacggtaaaatgaaaattatggttgatcgtagtggacaggttatgactgtcacgcagtaataaaatttgggtacaaaataaaagggaggtacatagtttatatgtatttcccttttgttttgtatggaatcgttccaaagatggaagatgaatgtttatgattgtagtagtctagagaccatttgcggaatttggttcgcttgtgaaaccatactaagtgcaacttcagtcaataatttgaactttaaaaaatcactcatctcctgcgccatgtctgcatcttcaacttgagatgcagcatctgttaacgccatactttgactatttaaattttcaatattaaattgtaaacgatttatcatagcaccaaggtcggcacgatgaagtgacacactttgcaaagcatcttcaattttaagaatcgccgctcttgcttcttgttctgttgaaatcttaatgtcatgttgtgtaggggaagggggaatatgtttcatcatatttattgtatgaccgatatcgtctaatgtaatagggcggttttgaccgtcaaatacagataaatcattaaactcagtcgtctcgccaatatagccaatttgttctgttaaagactgaaactctttattcagcgagtcacgatttttatttgaatttgtaccattcgcagattgaacagctaaatcacgcatacgctgcaaaatatttgacacagtttgaagagcagcttccgccgtgcgaagcatcgatatcgcatcctcattattacgaatcgccacgcgcataccacttgctctcgcgtgcatacgagtcacaatcgcaatattagcgggattatccgaagcgttgttcaacttcttaccagtcgccaaatgctccattgcaacattcatacgtttctcattctcatacaacgactgcctagcattcatacttaaaacattcgtaccaatacgcataatagacactccttatagattgatagagtcggtatcttttgatctaataaacagttatggaaggatagaggggcttatgcttatttactgtttgtgttttaacataagagggaatcaagataaaagcatcacggatactctcttccacataaaaaagaaagttttataaataatctatctatatagaaaaaataaacctctctgcaagcagagaggtttattcaggaaactaactcaaatggcttattgtaataatttagaaaccatttgtggtgtttggttagcttgagaaagcatgctgatgcctgcttcgtttaaaattttgaactttgtcatgttagacatttcttttgccatatcagcatcttcaatttgagaagcagaagctgccatattagtagcttggctcgttacgttgtttaagttatggtctaaacggtttaattgagaaccgaaagttgctctagcgtcagcaatttcttgaatagcagtgtccagagccgtgatttcagttgctgcagttgtagcatctaatttctttgatccatcagttgaaactgctaaagtaccagttgttttaccttttgtatcgatagctgtgattttcattgtatcatttgaagcgtcagaaagctgaattgtgatatctttcccaccaccacttaaaaatgcgttaccgttgaaatttgttttgtcagcaatatgatcaatttcttgtgctaatgcttgatactctttgtccatagatgcgatatctttatcgttttacaggtctctcatgaaagtaaaaaaattaagtttaaacatactatacgaggaggggatatgttgaaaaggatactgttagtttcaacaagtgctcatgatatgaatggacacccgactggtttgtggctggaagagctcgcagctccttatcatgtatttaaaaaggctaagtttgatgttgatattgtgtcaataaaaggtgggagagtacctatagatagagtgtctattccgaatggtatacctcgcgaattcaagcatgtagcttctttattgcaaaatacgaggccgatttcaaatgttcatttttcggattatgatgcggttttatttggtggtgggcacggggcgattgtagattttccaggtaatccatatgtagcaaatttgattgagaatatgtataacaataaccggattgtagcggctgtttgtcacggagtaagctctttagtcggtgtgaaaaataaggatggctcgttttttgttgcgggtaagcgtataacaggttatacaaacgatgaagaaagagctgtacatttagaaaagcgcgttccgtttttgttagaaagtaagttgaaagaagaaggagctttgttttatgtagcccccaattttacgccgcatgtagtagtagatggtcatttaattacaggacaaaatccacagtctagcgtggaaataggtaaggctataaaaagggctgtaaataaattatcgtcattttaatttctgctcatttcttcttattaacgggaatgtcttcttttcaaaaaaagatggagcaatgaatatgcactttatatagaagaaaccgactttcttatagaaggtcggttatttttctatcttgcaaattacgaaaaaaaggagcaaaataaaaaaggtcctagtctatacatgggcaaatgaaaattttcatacagaagcatttgaagtgagtgaacttaaagtgtgtaaaatataatgataaacataaaagatgatgaatgagaaaacgggtgatgaagttgaatagagcaatcggtgttatcgattcaggagttggcggtttaacagtagcgaaggaattaattcgtcagttgccgaaagagcgtatcatatatttaggagatacagcacgttgtccttatggtccacgttctcgagaagaagtacgtcgatttacgtgggaaatgacggagcatttactaaatttaaatattaaaatgttagttattgcgtgtaatacagcaactgcagttgtattagaagagatgcaaaaacaattaccaattccagtagtaggagttattcacccaggatcacgtacagctttaaaagtgacaaacacgtatcacgttgggattattggaacgattggaacggtgaaaagtggtgcatacgaagaggcgttaaagtctattaataaccgtgttatggtagaaagtttagcttgtccacctttcgttgaacttgtagagagtgggaatttcgaaagtgaaatggcgtatgaagttgtaagagaaacgctgcaaccactgaaaagtaccgatattgatacacttatattagggtgtacacattatccgattttaggacctgttattaaaaaagtaatgggagataaagtgcaactaattagttctggtgatgaaacagcacgtgaagtaagtacaatcttatatcatagtaaaatgttgaatgaaggagaagaacaaagcgatcatctcttcttaacaacaggaaaaataggcttgtttaaagaaattgcatcaaaatggttcggtcaaccgattgaaaatgtgaagcatattcatttagaaaaagaataatagtagaatttatataagtgagctcctgagaaatcaggagcttttgttttatcttgctatttgctgggtagtaagacccctgctgattaaagtttcaatttataagaggcacagcttgttctaaaacgtgaaacagctcgtatacataatagtacaaacttagattttaggggggaatggcatgcctaaatccacttttaaatgggttgttggtgctactgtgagcgctgttttactaacagggtgtggctttataaatcaagagaaagcaactgaacaaattgatccaccaaaacaagttacgtatacagagggtgggaagaaagaagtagctaaaaaagataagcaagggcaaatggtaaatagagaactataccttgttgataaaaatggttatgttgtaccacaaacgttagctatacctactccgaaagcaaatgagactgtgaagcaaacgttagaataccttgtgaaagatggaccggtaacgaatttattaccaaatgggtttcgtgcagtcattccggcgaatacaacgatgaccttagatttgaaaaaggacggaacggcagttattgatttctctaaagaaatgaaaaactatgcgaaagaagaagagcgtcaaattgttgaatctatagcttggacgttgacgcaatttacagagataaaacaagtgcagttccaaataaatggtgagaaattggcaaaaatgccggttggtggtacaccgcttggtgaaggagtgagccgtgcaaatggtattaacttcgatgatgaacaagtaacagatgtaacaaatacaaaaccagtcacactgtattttatggcgcaaaataataataaacagcaatactacgtaccagtcacacgccgcgttgcggaaggtaaagaaaatgactatgcagcaattatagatgagcttgtaaaaggtccgatccatcaatcgctcctaaatgattttaatccaggcgttaagcttattacgaatccgaaattacaagacggaaaccttacattaaactttaatgaaaatatatttgtaaacccagataaaaatatgatttcaaattacgtattgaagtcgttagttttatctttaacagaaaagaaaggtgtgaaaaatatttctattgaagtaaatggaaaagcaaatcttatagatgaaaagggcggaaagttaataaaacctgtagatcgtccagaaaacgtgaatacaggtagtttttaatcttgaataatttgatatacttaagtaagaaaggagaattgctttttgggttctccttcttttattgtatacatatcatacatttaaatttggctatactaacgagtagtaattaagaggaggttatttttatgcgagtagatggtagagagaaaacagaattacgccatatacatattcatacgaattatttaaaacatccagagggatctgtattaattgaagttggggatacaaaggtgatttgctcagcaacaattgaagagcgtgtaccgccatttatgcgtggagaaggaaaaggatgggtaacagctgaatacgcgatgattccacgtgcgacagaacaacgtacaattagggagtcaagtaaagggaaagtaacaggacgtacaatggaaatccagcgcttaattggacgagcattacgtgcggtagttgacttagaagcgcttggtgagagaacggtttggattgattgtgatgttattcaagcggatggtggaacgagaacagcttctattacaggtgcatatgtagccatggtattagcgtttgagaagttattacaagtagaaaaagtatctaaaattccagtaaaagattatttagcagcaacgtcagtagggattgttgaagaacaaggtgttgttttagatttaaactatgcagaagattctaaagcagacgttgatatgaacgtgattatgactggaaaaggccagtttgttgaagtgcaaggaactggagaagaagcgacgtttagtagagcgcagttaaatgaactacttgatgcagcagaacaaggcattttccaactgattgatatgcaaaaagaagcgttaggtgacatcgtatctcatatagagtagaggtggaaaaaatgaaacaagttgttgtagcgacaaaaaatatggggaaagtacgtgaatttgctgagttatttgagcgatttgatttagaagtgaaatcattacacgattttcctcatattgaagaagtcgaagaaactggtgaaacatttgaagaaaatgcgatcttaaaagcggatagtttgagtagacagttgaatgcaattgtaattgcggatgattcaggtcttattgtagatgcgttaaacgggaaaccaggcgtgtattcagctcgttttgctggagagccgaaagatgatcaagcgaatattgataaagtgttacaagaattaaatgaagtagcgtttgaaaagcgtaaagctcgtttctattgtgcattagcagttgctttccctgaaggtgataaaaagcctgtcattgtaaacgggacatgtgaaggatttattttagaacaacgccgcggggaaaacggctttggatatgatccgattttttatgtggaagaatataaaaaagcgatggcggaactaagttcagatgagaaaaatgctattagccatcgtggccgtgctcttcgtaaattagaagaaaaaatcccggaatggtttttaggagaataagggagagagaatgatgaaagctttaatcgtaagtgatagtcatagctctgtgaaggaattacagcagttgaaagagaaatatgaagggaaagtagatatcatgattcattgcggtgattcagagctaacgcctgctcatgaagaactgcaaggtttccgtgttgtaaaaggaaactgtgattatgctaactttcaagatgaaattgtaactgatgtagatggaattcgcttcttagttgtgcatggacatcgccataatgtgaaaatgacattacaaacgctagcgtaccatgctgaagaagtgggagcgcaagttgcatgctttggacattctcacgtattaggtgctgaattaatcgagggcgttttatttattaatccaggcagtattttattaccacgtcagcgtgtagaaaagacatttgctttattagaaatggatggaaatcaaatggaagttcgttttgaaacgttagacggacaactagttgaacaagcagtttttaaaagaggataagaaaatttatcctcttttaaaaaaggtgttgactttatgtgtggttatacatataataaatattgtcgatagggaaacggcgctaacgaagaaaagaaaataacatatgcgggtgtagtttagtggtaaaacaagagccttccaagctctggtcgagagttcgattctcttcacccgctccatgtcccagtagctcagccggatagagcatacgccttctaagcgtacggtcgggagttcgaatctctcctgggacgctaaaaaaaccttgttatcttttgataacaaggttttttgtttgtctaaaatttgatgtttgggttataggtgtagttcattcttgatatttgcgacctttcctttgatattaagtagttgcatatgtacttctttttcttaaataaaaagagcgccatttatgcgccctattcctcttatttaatttaaagaatcaataggtttatgatggaactcaaatccatatccagattctcttaattgtttacttacaatattataaaactctttaccattctagtacaattcagcagcagttatcggaacttattcccggtagtgtgttacaattaatagaagcggaaaacgagaatctccaattgactggacctgtgattggttagatggtttaagaaggtcgtataaaaaagggagatggcgcaaagatggcgagatcaaatgagaatgatttaacggagaaattggcggaaggtcaccggaaatatggtgatggcaattttacagtacagaacatcggtgatgaaactaacccgaattggactgtcgtaaaaaatgtgaggaaaggatcggcaggcattcgcgaaggagaagatatattaagactgcgatcaaaatatataaaatagtacggaaatgggcggagcgggagttcgaatctctcctggggcgccaagaaaaccttgttatcttttgataacaaggttttttgtttgttttaaattagttgttaataaacttgtcaaagacaaaaccataatctttcacattatattgtttcttcgtatcaacgagccagttaaaggcaatctcgttcatctctttaaattgctctgctaagtttacttgtgcgtttgaaatacggctgaaagcgttagatgccatatctaaacttttgtgtgcatattgtaatgtaatatcgttgtcgtatgaaatttcttcaattttaagtaaagctttatataaatcttttaattcttcaatatgttttttatggacatcaattgaatagtgttcatcgcccatttggaacttaatttctacatctaaatcaatcgttcccgcagtttcaagcgctacgtttttaatttgatatttactatagctaaagcggcgtagtgtacgttttttacttgttgcgcttgtaccgtctaagtgaattaaccctttgtttgtgaagcaatattcatctgatttcgatttaattagaaagtaaattttctccccatcttcatgcattacataatcatcggcatcgaccttatcatagtctttaggtgtaataacagaacctacatcgcttagtcctaatacatctgcggccatttttttaaacatatataatcccccttgtaaattaaagtcttaattgtacaaaaatatattaacatgatcttcatcctttgttttcttgtaatacgaaaatatctgaaggtaagttaagaaaagtaatgaataattattttgatcctaaattatttagtaaatctattagtttaagagtggattctccgaaaaataaccaagagaaaaaagttaattttgcaagtgattataaataaattccgtgaaagcacctcaagcgatatgaggtgtttttcaatctctttttgaaatcttacaattctgtaaggtaactgtaaggtagttcgatggtaagaaattgctaatcttttataatgaagataacaacgataaaacgaggaggcagaaatgatgaaaggattagttgtaacgggcttgacggttgcttttggatttgtagcgtatgagaaattaacgtatgtagttgatgttgtgaaacatttgattgcttagagaaaacagccatgagagggaaagggaatgagtgaatgaatggaatggttatttggaattataggtacttgtagtgtagtgttattgttctttgtcccaagtggtatacttagttcgacaacaagtttgttcttcttaagtttgtttgcttgtacgatgcttattattatgtttttaatgaagcgaagtaaaccaatcttctattttagcatgattgttatggcaattattgttctccaaattattacccttgtaatataccccacaattataaaagctttccattaatgatgaatcctctgcgtttgttgctggggatttttacttgtacaattttaatttttagtagagatttatttgtattggaatgtaaaaattaaatatttttatatttcaaacaaataatttggggatgttgtgttctcattacgcatttgatatatttactttgaacataattaaaatcaagaaaaagaggcggacgtatggataaaaaagaaaatacggtcgtattgtttccgcagctatcagagcgctatattgatgaaggttttttagcgttgaaagagcggaagttcgaagatgcattgcgctgctttgaaatattacgtcagtataatgcggaaacggaacaaacggaattagcttcagttatttgtttactcgaattaaaacgtatggaagaagcgaaagacaaatgtgaacagttgcttaaaacaggagttgtcttatttggtgatattcttgaaacgtacgtgactattttagttcaaacaaatgattatgaaggtgttattgaaactgttgaaaaggttttacaaacgaaagatataatgcctgatcaaaaggaaaaattagcgcagcttgctttatttgcagaaggtatgctaaatgagggagacgcatcgctagtggattcaaattttgagttgaatgagtttactaatgaaatttttggagaaaactttggacagaagctaagagcgattcagcgactttcattaaaagacttagatcttgcattacctgttttaaagaaatttttaatagatgaagagcaacacccctatttgaaaacttctattttgtataaaatgatagaaagtcaggtagaagaggaaatagaggtggaaaagtttgggaatgcaattaaggtaattccggcatttacaggtcataatgaggagcaatccaataacattatacataaattatcaagtcgattagagcaaaaatatcccgatatatttgaagcgatggttacatattggaaagaattgcaaattagcattttcccattcgctctattaatggataaagaagagatttggtcagctgttttagagagaattggaagaaagcgtttcggattggctattgatgaagaagagcttatggcagcatacaatatcgaattggaagagtttcatattgcctatcaatggttattacgtgttgaaagagaaggatatttgcccgtataattatgaaaaagaatcgttcagttcttgaaacgagcatattctatgttataatgtaagggttgcaaaaggcagaaaactgcctgtttgtaagagaagagaagtgtaattctcttacttaatatgtttcatattattctcgaacaaaatataccgtagttgtcttctgggcaattagtagattggaacattatatctgaaagcttttgctagaggattatttgtgtatttgttatttcaaaaaagagataatgaagatcttaatctatagaggtatgtgcatacattattatagttggagggaaagaataaatgtctacaaaatgggaaaaattagaaggtaacgttggcgttttaacaatcgaagttgatgctaaagaagtaaacaactctatcgacgctgcgttcaaaaaagtagtaaaaacaattaacgtaccaggtttccgtaaaggaaaaatgcctcgtccattattcgaacaacgctttggtattgaatctttataccaagatgctttagatatcattttaccaaaagcatacggtgaagcgattgaagaagctggtatcttcccagttgatcatcctgaaatcgacatcgagaagttcgaaaaaaatgctaaccttatcttcactgcaaaagttacagtgaaacctgaagttaaattaggtgagtacaaaggtttggcagtagaaaaagttgaaacaactgtaactgacgaagatgtagagaacgaattaaaatctttacaagagcgtcaagctgaactagttgttaaagaagaaggaactgttgaaaacggtgatacagctgtaatcgacttcgaaggtttcgttgatggcgaagcatttgaaggcggaaaaggcgaaaactactctctagcaatcggttctggtacattcatcccaggtttcgaagagcaagtaatcggtcttaaatctggtgagtctaaagacgttgaagtatcattcccagaagagtaccatgctgctgaattagctggcaaaccagcaacattcaaagtaacaattcacgaaatcaaaacaaaagaacttcctgagttaaacgacgagttcgctaaagaagcagacgaagcggttgcaactcttgatgaattaaaagcaaaacttcgcacaaacttagaagaaggcaaaaagcacgaagctgagcacaaagtacgtgacgaagtagtagaattagctgctgctaacgctgaaatcgaaattccagaagctatgatcaacactgagttagatcgtatggttcgtgaattcgagcaacgtttaagccaacaaggtatgaaccttgagctttactaccaattcacaggtactgatgctgacaaattaaaagagcaaatgaaagaagatgcacaaaaacgtgtaagaatcaatcttgttcttgaagctatcattgaagctgaaaacatcgaagttactgaagaagaagtaactgcagaagttgaaaaaatggctgaaatgtacggtatgccagtagacgctatcaagcaagctcttggaagcgtagacgctttagctgaagatcttaaagtgcgtaaagctgtagacttcttagtagaaaacgctgcataataaaataacaaggcacgattaaaatcgtgccttgttttataaatatagaaatatatttataaaacttttcgatggagaaggaaaagttcctttacaagtcgaatatacatatttcaaaagttttaaaaattttttatttgtacataactagtcatattatttgtatttctcgccacgtagtgacataatatgtatttacatacgatacatttatcgtgtacatacgaaggcaagaggttagcactttgtaaggggtgtgaaaatatgtttaaatttaatgatgaaaaagggcaattaaaatgttctttctgtggtaaaacacaaacgcaagttcgaaagttagtggcaggtccaggtgtttacatttgtgacgagtgtatcgaactttgtactgaaattgtacaagaggagcttgcgaaggacgaagaagtagaattcaaagatgtaccgaaaccggtagaaattcgtgaaatcttagatgagtatgtcatcgggcaagatagcgcgaaaaaagcactagcggtagcggtatataaccattacaaacgcattaattctaacagcaaaattgatgatgtagaattagcgaagagtaatatcgcacttatcgggccaacaggtagtggtaaaacattacttgcacaaacgttagcgcgtattctaaatgttccatttgcaatcgcggacgcaacatctttaacagaagctggatatgttggagaagatgtagaaaatatcttactaaaattaattcaagcagctgattatgatgtagagaaagcggaaaaaggaatcatttatattgatgagattgataaagtggcacgtaagtccgaaaatccatcaattacacgtgatgtatctggtgaaggtgtgcagcaagcacttctgaaaattttagaaggtactgtagcaagcgttccacctcaaggtggtcgtaagcatccgcaccaagagtttattcaaattgatacaacgaacatcttattcatttgtggtggagcgtttgatggcattgagccgattattaaacgtcgccttggtgaaaaagtaattggatttggttctgagaagaaaaatgctgatgtaaatgagaagcatgttttatctcacgtattaccagaggatcttttaagatttggtttaattccagagtttatcggtcgtcttccagttattgcgaacctagagccacttgatgaagatgctcttgttgatattttaacgaaaccgaaaaatgcacttgttaagcaattccaaaaactattggagcttgacgatgttgagttagagtttgaagaaggtgcactaatcgaaattgcgaaaaaagcaattgaacgtaaaacgggtgctcgtggacttcgttctattattgaaggcttaatgcttgatgtaatgttcgaacttccatctcgtaaagatatcgagaagtgtattcttacaaaagaaacagtagctgataatgagccgccaaaattggtgttacaagacggtactgtacttgatacaaaaacatctgcataatgcgaaagggaaacagcaatttttataattgctgtttttctttatgtttagctacgttcctccgcggaaatactaagagataaaatattgcgggaggaaataaataatgagctggacaaatatatttttagttgttcaacttgtttttggtgtaattgtcggattgtatttctggcatttacttcgaaatcaacgaacacaaaaagtttcaattgatcgagaatcgaaaaaagaattagaacagcttcgtaaaatgcgtgagatttctttaacagagccgctagcagaaaaggtgcgtcctacaacctttttagatattgtagggcaagaggacgggattaagtcgttaaaagcggctctttgtggtccgaatccgcaacatgtaatcatatatggcccacccggtgttgggaaaacagcggcagcacgtcttgtattagaagaagcgaaacgaaatcctaaatctccatttcgtacgaatgcaacatttattgaacttgatgcgacaacagctcggtttgatgaacgtggtatcgcagaccctttaattggttcggtgcatgatccgatttatcaaggtgctggggcgatggggcaagcaggtattccacaaccgaaaaaaggtgctgtaacagatgcacatggtggtattttgtttattgatgagattggcgagctccatccgattcaaatgaacaaaatgttaaaggtgttagaagatcgaaaagtatttttagaaagtgcgtactatagtgaagaaaatacaatgatcccaacatatatacatgatattttccaaaaaggcttaccggcagattttcgcttagttggagcaacgacacgttcgccagaggaaattcctcctgctattcggtcacgttgcttagaagtatttttccgtgaattagatacggaagaaattcaaaaagtagcgaaaaatgccgcggaaaaagtagaaatgcaaataggtgaaaatggtattgagatgattgggatgtatgcaaggaatggacgagaagcgattaatctcgtgcaaatctctgcgggtatggcgataaatgaagaacgttctttcattaaggatgaagatatagagtgggttgttcactcaagtcagcttacaccgaaatatgaaaagcgcatttatccgattccaaggattggtcttgtaaatggtcttgctgtatacggaccaaatacaggtgcgttattagaaattgaagtaacagcaattccggcgaaagataaaggatcggtaaatgttaccggaattgtggaagaagaaagtattggtagtcaaacgaaatctattcgtcgtaaaagtatggcgaaaggctctgttgataatgtattaacagtacttcgttctttagatgtgttgccagaaggatacgatatacatattaattttccagggggtatcccaattgatggcccttctgcaggaatcgctatggcaacaggtgtatattctgcggtgcatcgcacgtatgtaaataatgaagtagcgatgacaggtgaaataagtatacacggagaagtaaagcctattggtggtgtatacgcaaaaataaaagctgcgaaaaaagcgggagctaagaaagtcattattcctgctgaaaatatgcaaccatttttgtatacgatcaagggaattgaaattattcctgtccgtaagttaaaagaagtatttgagttaacgtttatgcaaggaaatatgcatagagagctagatgtacatactaacgtagacgaaacagatgcacaatctatgtaaaaataaacaataataaaatttgccagacttcgtttaagtttgtatgcttaatcggagtctttttcttttcgtgaggtagaaaaacaagctatttacaattgcgcggaatctcagcaattgcatctaggtgtattgtaatataaaatagttgaacaggagtttaatttattatggaggtgctatgtctagtatgaatacgaacgaaagaatcgtgcccctcctaccattaagaggcgttctcgtatatccaacgatggttttgcatcttgatgtaggacgtgataaatcgatacaagcactagagcaggcggcaatggatgaaaatatcatctttttagcaatgcaaaaagaaatgaatatcgatgatccgaaagaagatgacatatatagtgtaggtacagtggcgaaagtgaagcaaatgttaaaattgccgaacggtacgcttcgtgtccttgtggaaggtttacatagagcagaagtaatagagtttatcgaagaagaaaatgtagtacaagtgtctattaaaacggtaactgaagaagtagaagatgatttagaagagaaagcttttatgcgtacgttactggagcatttcgaacaatatattaaagtttcgaaaaaagtttcaaatgaaacttttgcaacggtagctgatgtggaagaaccagggagattagctgatttaattgcttctcacttgccgattaaaacgaagcagaaacaagagattttagagattgtatctgtaaaagaacgattacaaacacttatttcaattattcaagatgaacaagagttacttagcctagaaaagaaaattgggcaaaaagtgaaacgttccatggagcgcacgcaaaaagaatatttcttacgtgagcaaatgaaggcgattcaaactgaacttggcgacaaagaaggcaagggcggagaagtagaagaacttcgtgagaaaattgaacagtcgggaatgccggaagaaacaatgaaggctgccctgaaagaattagatcgttatgaaaagttaccagcaagttctgcggagagtggtgttattcgcaattatattgattggttattagcgcttccgtggacagaggcaacagaagatataattgatcttgctcattcggaagagattttaaataatgatcattacggtcttgaaaaagtgaaagagcgtgtacttgaatatttagctgtacagaagttaacgaattcattaaaaggacctatcctttgtttagtaggccctcctggggtcggcaaaacttcgttagcgcgttcaattgcaacatcattgaatcgtaacttcgtccgtgtatctcttggtggtgtgcgtgatgaatctgaaattcgtggtcaccgtcgtacatatgttggagcaatgccaggacgcattattcaaggtatgaaaaaggcgaaaacagttaatccagtcttcttattagatgagattgataaaatgtctaacgatttccgtggagatccatcagcggcattacttgaagtattagatccagaacaaaaccataacttcagtgatcattacattgaagaaccatatgatctatcaaaagttatgtttgtagcaactgctaatacactttcaagtattccaggtccattacttgaccgtatggaaatcatttcgattgctggctatacagaacttgaaaaagtacacattgctcgtgagcatttattgccgaaacaattaaaagaacatggcttacgaaaaggtaatttacaagtgcgtgatgaagcgctgcttgagattattcgttattatacacgtgaggctggtgttcgtacgctagagcgccaaattgcaaaagtttgccgtaaagtagcgaagattatcgttacagcagaacgtaaacgtatcgttgtgacagagaaaaagattgttgatttacttggtaaacacatattccgttatgggcaagctgaaaaaacagaccaagttggtatggcaacaggtctagcttacacagcagcaggcggcgatacacttgccattgaagtttctgtagcgccaggaaaagggaaactaattttaacagggaaacttggggatgttatgaaagaatcagcacaagctgcgtttagttatatacgttctcgtgcagaagagcttcagatcgatccgaatttccatgagaaaaatgatattcatattcacgttccagaaggagcagttccaaaagacggaccgtcagcaggtattacgatggcaacggcacttatttctgcgctaacaggtattcctgtaagtaaagaagtgggtatgacaggtgaaattacacttcgtggtcgtgtattaccaattggtggtttaaaagaaaaaacattaagtgctcaccgcgcaggcttaacaaaaattattttgccagcagaaaacgagaaagatttagatgatattccagagagcgtaaaagaaaaccttacgtttgtgcttgcatctcatttagatgaagtattggagcacgcattagtaggagtgaaacaatgaaagtaacaaaagcagatattgtaattagtgctgttaaaccagaacaatatccagacagtgatttaccagaaattgcattagcaggtcgttcaaatgtggggaagtcttcctttattaataaaattttaaatcgtaaaaagttagtgcgtatttcttctaaaccaggaaaaacgcaaacgctgaactttttcttaatcaatgagatgatgcactttgttgacgttccaggttatggatatgcaaaagtatctaaatcagagcgcgctgcatgggggaaaatgattgaaacgtactttacaactcgtgagcaattagacgcagctgtattagtagttgatttacgtcaccaaccaacaagtgatgacgtgatgatgtatgatttcttaaagcattatgaaatcccaacaattattattgcgacgaaagccgataaaattccgaaagggaaatggcaaaagcatttaaaagttgtaaaagaaacgcttgctgttgaaattggcgatgaaattgttctattctcttctgaaacaggacttggaaaagaagaagcgtggaaagcaattcataaatttacaaaaacaaaaaacgcgtgacgaatgtcgcgcgtttttgttttgctaaattttttagcgtacgtttaatgtaacttcaatatttcctcgtgttgctttcgagtaaggacatacaccgtgagccgcttctacaagttcttgtgcttcgctatgtgaaacgccagccacatgtacatcaagtacagcagatagaccgaaaccaccatctgtatcttttccgatagaaacgtgagcagttacttctgtactttctactttcacacgttttgtacgaatgacaagttgtaatgcactatcgaaacaagctgcataaccagctgcaaatagttgttctggatttgttgcttctccgcctgcaccacctagtgctttcggcatttttacatcaagatttaatatgccatcatctgaaactactttcccatttcttccacctgttgctgttactgaagcagtatataatttatccatatttattccccttttccatcattaattgttttcattgtgtcaattagtttatttagttgaattaataaagagcgatattcttgctctgtaattcctaagtttgtagccatcgttgtcggtaatgaacaagccttttcctttaaatcgttgccttgttctgttaattcaatacaaacttttcgctcgtcttctttggaacgaacacgttttacaagttttaatgattccatgcgttttaacataggtgttaacgtaccagaatctaaaaatagacgttctccaatttcttttactgttagtccatcttgctcccatagtacgagtaaagtaatgtactggggatacgtaatacccatttcttctaaataaggtcgataaaaacgagtaacctctctagagcaggtgtaaatagaaaaacaaagttggttatctagatgcaaagagtcctctgtcataaataactcccttccaattaagttgtgcacaatttaattttgtaaaaccaatataacgaaaaagaaatacaatgtcaaatacattgtattgagaaagtctttgttgcattttggaacaatcatacatattttccttcatgatgaaagaagatagggaagatgatgttataatttatatggaatagtttccatcacttgattatgagggctttttttggtaacgtacaaatagagttattaatttataatcattataaagtagaagtttttttattagtgttactgaatctcctttattacatacggagaataattaaaaaataatcggttgttcacacgattgtcagattcataagaggaaagttgtattatgatagtagataaagtgataaaacgggtgaagggggacatgctgcgtgcatattcttgttgttagtgtaaattatcgaacagcccctgtagaatttcgtgagaaactcacatttcaggcagcagaactagagcgagcgatgactacattacaaaatcaaaagagcgtgttagagaatgtcattgtatcaacttgtaatcgcactgagatttatgctgttgtcgatcaattacacacgggacggtattatattaagaagtttttagctgattggtttcagcttgaaatagaagaagtcgcgccatatttaactatttttgaacaagatggtgcaatagatcatttattccgcgtaacgtgcggtttagattctatggtagtcggagaaacgcagattttaggtcaaataaaagatagctttttagaagcgcaacaagttaaagcaacaggcacaatttttaatgaattgtttaagcaagtcattacattagcaaaacgtgcccactcagaaacaacaatcggggaaagtgcgatgtctgttagttatgctgctgttgagcttggaaagaaaatatttggcgagttaacagattgtcatgtgcttattcttggtgctggtaaaatgggcgaacttgcactgcaaaacttatatggaagtggtgctcgtaaagtaacagttatgaataggacgctttcgaaagcagaagtaatggctgagaaatatatgggacatgcaaaatcgttaagcgaattacaatgtgcattattagaagcagatattttaattagttcaactggtgcatcggagtatgtcattacgaaagagatgatgacgaaggtagagaaaatgcgctctggtcgccctttgtttatggttgacattgcagtgccacgtgatattgatccagcgattgatgagctagaaggttctttcttgtatgatattgatgatttacaaggagtagtggaggcaaaccgtgctgagcgtttgaaagaagcagagaaaattcaatttatgattgaagaggaaattgttctatttaaaacgtggttaagtacacttggtgttgttccattaatatcagctcttcgtgataaggcacttgcaatccaaagtgaaacgatggtaagcctagagcgaaaaataccaaaccttagtgatcgtgagaaaaaagtcattagtaagcatacgaaaagtattattaatcaattattaaaagacccaattttagtagcgaaagaaatagctgctgaagagggagcgagcgaaaaattagcgttatttgcgaagattttcgatttagaaacggaagacgtagagagttgtgcggaagaagtagaacataaaaaagtgtggacaccatccgttccatctttataatttggaaggatgatcggatgagttttttaaataacagtattatttatcatattgcaattattttatatgcttgtagcattagtttatattttatagattatttccaaagtaaccgaaaggcgaaccgatttgctttttggttacttgcgattgtatgggtcctgcagtctatttttatgttgcttagggctacagattcagaaacgaatcctattttaactttattatcagggatttatttttatgtttggttattgattacgatgtcgttagtcattaatcgatttatgagaatcgactttttagtcttttttacaaatgttgttgcatttggcgtaagcgctttttctatttttacaccgctcggaaagatgtcgccagtacttgcggaacaattagtttcagaacttgtatacgtgcatgtcggtatggcaattatttcttacgcaacgtttactgtatcgttcattttttctattatgtacttattacaatatcgcctattaaaaaagaaaaaatggaatgcgagattaagaaggttagggaatttaccgaagctagaatctatgtcttacggattaaatttattttctgttccatttttcttactagcaattttattaggatgtatatggggatatacaaaattggataatttccattggtatgatacgaaagtaatcggatcttttgtcgttctatttgtgtattgcacaggtttatatttacgagcggcagatgtgttgcaaggtaagaaaattgtacagtggaatatcggatcgtttctcgtaatgctagtaaacatttttctattaagcagtttatccaatttccacttttggtatttataatgaggagagagaattatgcgcaaaattattgtaggatcacgaaagagtaaactagcattaacgcaaacaaactggtttattgatcagttaaaagccctaggtctaccatatgaatttgaagtgaaagaaattgtcacaaaaggtgatgttattttagatgttactctttcaaaagtaggcggcaaaggcttgtttgtaaaagagattgaacatgcgctacttacgaaagaaatcgatatggctgtacatagtatgaaagatatgccagccgtacttccagaaggtttaatgattggctgtacaccaaagcgtgttgaccctcgtgatgcttttatctcaaaaaatggagcatcgtttaaagagttagcggaaggtgctattttaggtacgagtagtttaagacgtagtgcacagctactcgctgcgagaccagatttacaagttaagtggattcgcgggaatatcgatacacgtttacgtaaattaaaagaagaagattacgatgcgattattttagcgacagctggattacaaagaatgggctgggatgatgaagttattacagaacatttagatgaagcgttatgtgtacctgctgtaggacaaggtgcattagcgattgagtgtcgtgaggatgataaggatttattacaattgttagcgcatattaatgatacgataacagaaagaacagtggcagcggagcgagtatttcttcataaacttgaaggtggatgccaagttccaattgctggatatgcaacccttacagaaaacgatgcaatcgaattaacagctcttgtcggctctatggatggctctgttttattaaaagagacagtagtgggtactaatcctgaggaagtaggattagaggccgcggaccgtttaattaagcaaggcgccaaagaactcattcttgctgcaaataaggagcaacaataaatatgaacgctctcgctggaaaaacggtattgattacacgtgcccagcatcaagcgaaacaaatgagtgtagcagtgaaagaaaagagcggaattccattggaaattccgcttttgcgtatggaaggtatgtctcataggcaaattcaacatattgaagagcagctacattcatacgactgggttatttttacgagcagaaatggtgtagctttttttatagatagtttaaaaaagaaactaccactaaccattaaaatcgctgcggtaggtgtgaaaacaaaattagagttagaaaaaaggggctatcaagttcattttgttcccacttcatttgttgcagaagcatttgcagaagagtttctaaaagaattaagtggaaatgaacgtattttatttccgaaagggaatttagcaagagaggtaattccggttgccctacgggaaattggtatttctctagatgagctaaccgtatacggtacgaaagtgaatatagaaaaaaagcaagagcttatagcggcattgaagttagggaaagtagacattattacatttacgagcccttcaactgttactagttttgttcgtttacttaagggtacaaactggagagaatggacaaaaaaatgtacaattgcttgtataggacctattacggaaaaagaggcaagtctttattttccgtctgttattgtgccgaaagagtacactgtagaagcattactacaatgtgtttgtgaatctataaaatgaaagaatggggatagaaatctatgaactctttacaatttaatcgtcatcgtcgtttaagacaaagcgggggcatgcgtgcgcttgtgcgtgaaacgtttttacatacggaagattttatttaccctatttttgtattagaaggtgaaaatgttcgtaatgaagttccttctatgccaggcgtatatcaaatgtctttagatttattgcaagctgaaatgcaagaagttgttgatttaggtattcgttctgttattgtatttggtttacctgctgaaaaagatgaagttggatcatcagcatattgtgatcatggaattgtacaacgtgctattcagcaaattaaaggtgatttccctgagctagtagtagttgcagacacatgtttatgtcaatttacaagccatggtcattgcggtgtaattgaagatggtattattttaaatgacgagtctcttgcagttcttgcgaaaacagctgtaagtcaagcgaaagcaggagcggacattattgcgccatcaaacatgatggacggcttcgtaacagcaattcgccatgcattagacgaaaatggttttggacacgtgccagttatgtcgtacgctgtgaaatattcatcagcattttatggaccattccgcgatgctgcgcacggtgcaccgcaatttggtgaccgtaaaacatatcaaatggatccggcaaaccgtatggaagcattccgtgaagcagaatcagatgtaatggaaggtgcagacttcttaatcgtaaaaccagcgctttcttacttagatatcgttcgtgatgtgaaaaataactttaatttaccagttgtcgcttataatgtaagtggtgaatattcgatgattaaagcggcagcgcaaaatggttggattaatgaaaaagaagttgttcttgaaaaattaattagtatgaaacgtgcaggagcagatttaattattacgtatcatgcaaaagatgcagcaagatggttacaagaaggaggcgctaaataatgaaaaagtttgataagtcaattgcagcgtttgaagaggcgcaagacttaatgcctggtggcgtaaatagcccggttcgtgcctttaagtctgttgggatgaatccgttgtttatggagcgtggaaaaggctctaaagtatatgatatcgatgggaatgaatacatcgactacgtattatcatggggtcctttaattcatggtcatgcaaatgatcgtgttgtagaagcgttaaaatctgttgctgaaagaggtacaagcttcggtgcaccaacagaaattgaaaataaattagcaaaacttgttattgagcgcgtgccatcaattgagattgtgcgtatggttaactctggaacggaagcaacaatgagtgcactacgtttagctcgtggttatacaggtcgtaataaaatcttgaaatttatcggttgttaccacggtcatggtgattcgttattaattaaagctggttctggtgtggcgactttaggtttaccagatagtcctggtgtaccagaaggtgtagcgaaaaatacgattacagtagcttataacgatttagaaagtgtaaaatacgcgtttgaacaattcggtgatgatattgcttgtgtaattgtagaaccagtagcaggaaatatgggggttgttcctccgcagcctggatttttagaaggtcttcgtgaagtaacagaacaaaacggtgcattgcttatttttgatgaagtaatgacagggttccgagtagcttataattgtggccaaggttattatggcgtaacgcctgatttaacatgcttaggtaaagtaatcggtggtggtttaccagtaggagcatacggtggtaaagcggaaattatgcgccaagttgcgccaagcggaccgatttaccaagctggtactttatcaggtaacccacttgcaatggcggcaggttatgaaacgttagtacagttaacgccagaatcatatgtagaatttgagcgtaaagctgaaatgttagaagctggattacgtaaagcagctgaaaaacatggcattcctcaccatattaaccgtgcaggctctatgattggtattttctttacagatgaacccgttattaattacgatgcagcaaaatcttcaaacttagaattctttgcggcttactatcgtgaaatggtagaacaaggtgtattcttaccgccatctcaattcgaaggtttattcttatcgacagcacatagtgatgcagatattgaagcgacgattgcagcagctgaaattgcaatgtcaaaattaaaagcgtaatgtattagagaaaatcgctctccataaggggagcgatttttttattcataaagtaagctttccgcacataaatctgtaatgacatatagtttgggagggggaaaagaagtggctgcagatcattcattacgattttcattaaaagaatctgtgtggttccaaaaaggacaggaagtcgaagaacttttgtcaatttcgttagatccagacgttgagatagaagagcttgatcatgaagtaatcgtgagaggacaattagatttaacgggagagtatgttgcacgaaaagatgattcagcgtattcattaagagaactatcgccagcaaagtcaattgattatgtagaaacaagagaagatggggttaatgaacttgttcattcctttccacttgaaatatcaattccgagaaatcgagtgaaagtaattgaagagctatatgtatcaatcgaggaatttgattatgaattaaaggaaaatggttgcttacaattattagcggatatatctattaccggtttgtgtgatgaagagagaagcgaggatgaagttgaagaggaagaaacggtgtatgctgagttagaagaagattcagcgcaagaggatgaaaatagaccggcgccgcatgtagaagaaccagcatataaggaatcagatgagtgggaagattacgcatttgaaccgttccaattagaggaaagaaaagagcaggaattagaagaagagaaaatagaagaacatgaatttgtggaacgtgaagaggagcaagaaacaacgccgcaatttgaactgttcggacgaaaagatttcaagaaagaaaaagcaaaaaagcaggaagaacaagaagaagagtactcacagcgagatgaaaatgcgctttatttaacaaaactatttacgaaagaaccggaagaagaatttacaaagttaagaatgtatttcgtgcaagaaggggatacaattgaatctattgcagaccgttatgaaacgtctgtacaaaatttacaccgtgtcaatcaaacagaagatatatttttaaatacggggcaaattatttatattcccgtttcaagggtaaagacgaaataaggaagtgagtgttttcactcacttcctttcttagaggctatgttttgaatagaaagggttattcgtatggatattgagttgcgaaatcactatgaacctatcgtgaggcaatatagattggatacgcagcatatggaagagcacggaaatgtaatgaaaatttatacgaatcaaggtccatatgcactcaagaaaatagaaggcagaaagttagagcggaataactttctgcatcatattcaatatttgaaggagaaaggtttttcaaattatgtacctatatatcatgcgacggatggaagttatattttaagtgacgggacgtataattattatttaatgccttggttagaacgtgcagaaggaaacggtgatgacaatgatcaataccataaaatgtttcagacacttggaacgttgcatcaaaaaactgtgaaggaagaaacgtatacggaagaagatttagaaaaacattatacaagtatatccgatcgttgggaaaatgatggtgagatgttagaagagtttctcgtagaatctgaatcaaaatggtatatgtccccgtttgaattgcaatattgtacgtactatcatcatgtaatgagagcgcgtgaatttgcaacgaagcaattaaatgagtggaacgatgcgatgaaagaaaaagagaaaacgcgtattacttttgtgcatggtaatgtgtcacttaatcattttttatttgactatgagcggaatggctattttattagtttagaaaaatcgaagtttgcaacgcctgtgcaagatatagtaggtttttattcacggtctttaaacacatatccaatcgcaagaagtgatcggtttgaatggtttcaaatgtatcaaaaaaatttcccttttacgaaagaagagcaactacttatgtttgcgtatatgacgtatccatcgcaatttattcggcaaatccagtcttataagaaaagaagagataatcgcaacgaggaaaatgaactgcgcggagtaaagagtttgcaacaatcgcattggctcgttagcaatatagaatatttcctgtcgcaattacaagctgcccagcaagggaacggataaagtaaaggcattctccgctgatgattagccttcaccaattgggcgtttacgggcagcagggctcccatctaacttctttgcttcagctgagttttgaggtggaggtcttactgcccgcaaatagcgggggaaagaagataagtagaggattctacttatcttcttttttttgcacgaaaagctgtagttttaaatttatcttgacgaataaggtttcgttttttacactattgtatataataattaacaatcatataaatgccttgaaggggaagagtataacatgaaacgtcttcagagaggagaatcattagctgagagattctctagatagttatgttagaaggtagccctggagcatcttttctgaacggaatagttcttattaggaaaagacggatttgtccgttatcaaattaagagtataagcaaattatgaatttgtttgtaaataaaggtggtaccgcgatgtccctcgtcctttttggatgagggacattttttattttaaggagggaaaataatgtcaaacacggaaaagaatttaccaactaaatatgatcatatgtccgttgaagaaggcctttatcaatggtggcttgaaggcaaatattttgaagcaacaggagacgagaagaaacaaccgtatacaattgtaattccacctccgaacgtaactggtaagttacacctaggtcatgcttgggatacaactcttcaagatattttaactcgtacgaagcgtatgcaaggatacgatgtactatggcttccaggaatggaccatgctggtatcgcaacacaagcgaaagtagaaggaaaacttcgtgaagaaggtatttcacgttacgatcttggccgtgaaaaattccttgaaaaagcttgggagtggaaagaagagtacgcttctcacattcgtcaacaatgggggaaagttggtttaggactagactattctcgtgaacgattcacattagacaaaggtttatcagatgcggttaataaagtattcgttcaattatacgaaaaaggcttaatttaccgtggtgaatatatcatcaactgggatccagcaacacgtacagctctttctgatattgaagtaattcataaagaagttcaaggtgcattctaccatatgaactatccgttaacagatggttctggtcacattcgtcttgcgacaactcgtccagaaacgatgcttggtgatacagcagtagcagttcatccagaagacgatcgttacaaacatttaatcggaaaaacagttacacttccaatcgtaggccgtgagattccgattattgctgatgagtacgtagaaaaagatttcggaacgggcgttgtaaaaattacaccagctcatgacccgaatgactttgaagtaggtaaccgtcatgacttaccacgcatattagtaatgaacgaagatggaacaatgaacgaaaaagctggtaagtataacggtatggatcgtttcgaatgccgtaaagaattagtaaaagacttacaagaagctggcgtattagtagaaatcgagccacatatgcattcagtaggtcatagtgagcgtagcggtgcagttgttgagccttatttatcaacacagtggttcgtaaaaatggctccacttgctgaaaaagcagtagcgcttcaacaaaaagaagaagaaaaagtaacgttcgtaccagagcgttttgaaaacacatatttacgttggatggaaaatattcatgactggtgtatttctcgtcaattatggtggggacaccgtattccagcttggtaccataaagaaactggtgaagtatacgtaggtacagaagcaccagcagatattgaaaactggaatcaagataacgacgtacttgatacatggttcagttcagcgttatggccattctcaacacttggttggccaaatgaagattcagcagatttcaaacgttactattcaacagatgcactagtaacgggttatgatatcatcttcttctgggtatctcgtatgattttccaaggtttagagtttacaggagagcgtccatttaaagatgtattaattcacggtttagttcgtgacgagcaaggtcgtaagatgagtaaatctcttggtaacggtattgacccaatggatgttatcgagaagtacggtgcagatgcaatgcgtttcttcttatcaacaggaagtgcaccaggtcaagatttacgtttcagcatggaaaaagtagaatctacttggaacttcattaataaaatttggaacgcatcacgtttcgtattaatgaacatggatgatatgaagtatgaagaaatcgatttaactggtgaaaaatcagtagcagataagtggatcttaacgcgcttaaacgaaacaatcgaaagcgtaacacgtaacatggataaatatgagttcggtgaagctggtcgttcattatacaacttcatttgggacgatttctgtgattggtatattgaaatggcgaaacttccactatacggtgaagatgaagcagctaagaaaacaactcgttctattttagcttacgtattagatcaaacaatgcgtctattacacccattcatgccattcgtaacagagaaaatttggcaacatttaccgcatgaaggcgagtctattacagtagctgcgtggccaacagttcgcgaagatttacaagatacggaagctgcggcagaaatgcaccttctagttgatatcattcgctctgttcgtaacatccgtgcagaagtaaatacgccaatgagcaaaaaagttcaaatgcaaattaaagcaaaagatgaggctgtacttgctcaacttacgaaaaacagctcttacattgagcgtttctgtaacccaagcgaattaacaattcaaacagacttacaagcgccagaaaaggcaatgactgcaatcgtatcaggtgcagagttattcttaccgttagctgatcttatcaatcttgatgaagagagagctcgtcttgagaaagaacttgagaagttcgataaagaagtagaacgtgtacagaagaaactttctaaccaaggtttcgtagcgaaagctcctgcagcggttattgaaggagagcgtgcgaaagagcaagattacctagaaaaacgcgaagcagttcgtcaacgtctagcagatcttgaaaagtaaaaatgtttttagagactcactatattggtgagtctcttttctttgcgtataatagaactatgaaagttgtctattgaaaggggaaaaacatacgtgatacatacatacgaagaagcgatagggtggatccatagccgattgaaatttggaattaaaccaggattagaaagaatgagatggatgttagaagaacttggaaatccagagcgtcatataaaatgtgttcatcttgctggtacaaatggaaaaggttcaacgttaacatatatgcgttacatgttagaaggcgcgaaatataaggtaggaacgtttacctctccttacatcgaatcatttaatgaacgcattagtgtgaatggaacaccaattgcagacgaagagattactgaacttgtaaagatggtaaaaccagtcgttgaaaaactagatgaaacggatttaggggaagcgacagagtttgaaattattactgttatggcgatttgctatttcggtaaagtcaatttctgtgatgttgttttatttgaaacagggcttggtggacgttttgactctaccaatgttatacaccctgtcctcacgattattacgaatatcggtcacgatcatatgcatattttaggaaatacactaggggaaattgcatatgaaaaggcggggattattaagtctggcgtgccggtaattactggtgtacaagatgaagaagctttgcaagtcattcaaaatgttgcaaaggaaaaccatgcaaacttatacgaacttagcaagcattttacagcgttacataaacagtctaatgaagatggggaacagtttgattttacttgtcctttttccgcatttgaagatttgcaaatctcaatgaaaggcattcatcaagtaggaaatgcagcgttagcacttatggcagtaatgtatgtaaaaacatatttatcatttttaattgaagaagaggaaataagaacgggattactggaagcatattggattgggcgctttgaaaagttgcaaagtaacccggatattattatagatggtgctcataatccagaaggtatcgaaagccttgtgaaaacagtagaagcgcattacaaagataaaaatgtaatagtgttatttactgctcttggtgataaacaattacataacatggtaggccaattagaaaccattgcagatgaaattatttttacaacattcgcctttgatcgtgctatttctgctgataagcttgcatcatattcacagaaagaatcaaaattagtttttgaaaattggaaagaggcaattgatacaaaagttgaaatgatagcagaaaatgatgtttttatcataacgggttctctttatttcatttctgaagtacgaaaatatattcgcgagaaaaactagatagtctttgctatctagtttttttgttctacaaatgaagtcaaatgcatacatataagataaatatatagggttatttggcgaattcctctgacaaatatctcgtttttttatgaaatgaatatgatatgatgcggacaacgataagaggtgaggtgtgagtgtatggacaagcaatcacgaacgatctcagtgaaagtgaatggaacagaagcgaagtatgaggaaaaaaagaaagatgaatttgaatggatggtagtagaaagtgaacgaccgaaaaatgttgttccgtttcaaaaagcgaaatcaatgtctgtggaaaaataccgaaagaagtggagtaatacattaattgtaatcgttgcaactgcaatcattatcggtacggcgtttggaatggggatgcttcatttacttactggacaaggaacgacaggaggaagtgaagtgacagcttcaaggccgactggaaatggagaatcaagggtgggtggaacggcagaacaaacaccagcaccgaaagaagaaaaacaaaaagcacaggcaggaacgtcattggatccgatgaaattattttttgttcaaggggggctttattcttctgaagaaaagggacaggcagctcttgaagaatggaaaggcaatgggggcattggtgctttgagaccgagcggtgataagtatgcaatagttgttggtattgctagcgatgaacagtctataaatcaattaatgactaagtataaaaatgatggtgtctccgttttaaaaaagagctgggatataacagataaagcattgctgaaagatgataaagaagtagggacatttttaacaaaagtgcagccattatacactcatttagcaaaatatgcttctagcgtacaagttggtggaaaaagcagcccaaaagatatagaagcaattgaaaaagaatggaaaaaggttgaaaaagaaggggaaagtatgaaacgagaagaagcaaagaaactgtatatgtatacgtcggtagctgtacaaacagtaaaagatgggaagatggataaggaatctttggcgaaattaaatcaagttattattgatggtttactctcgtatgaaaaaattgtttcgtagaaagtgaaatgataggataataaaatgagtaagaaagaagtacatgtacttctttcttttcttttgaatttagagcaaagtgctttctctatgatgggaatataatcgtatgcaataaagaagtgttattttagttagagaaattaatatttctttcatttgtgggcaaactattcctttgatacgattaatataaattgttctgcttcatgtgagaaaggaaggagaaaatatgagaaaaataattttagcttcaggatcacctcggaggaaggaattgcttgagttagctagtgtgccatttgaaatcgttgtaagtgaagtagaggaaacaattggtgcatattcatcgccttctgatattgtaatgtcgcttgccttgcaaaaagcatcagcggtggcagaaaataatagtgatcacattgtgttaggtgcagatacaattgttacatatgagtcgcgtattcttggtaagccttctaatgaggatgaggcgaaagagatgttacaattactatcagggaaaacacatgaagtgtatacaggtgttgcgattatagcaaaagaaaaaacggttactttttatgagcgtacagaagttacattttgggagttaacagaagaggaaattgatacatacgtcgcgtcgaaagaacctcttgataaagccggtagttatgggattcaaggtaaaggatctattttcgttcaaaatattcaaggggactactatagtgtagttggcttaccaatcgcacgcctcgttcgggaattaaaacaatttgatattgatgtaacccatgcgtaaaattgcatggggttttctttgagagaacaaataaaggggtggagagatgaacggtattcgtgatgttgtaagagaagaacagccacgggagcgtttattgttagaaggtgctggaagtttatcaaatcgagagcttctcgcagtgttactcagaacaggttctaaagaagaaacagttttaaagttgtcagataaaattttacaccaatttgatggcttacgtatgttgaaagatgcaacattagaggagctaattagtatacatggtattgggatttcaaaggcatcgcaacttatggcagcctttgaactaggcagaagaatggtacgtttagaatatcaaaatagatatagtattcgaagtccagaagattgtgcgaaatacatgatggaagaaatgcgttttttacaacaagagcattttgtttgtttatatttaaatacaaaaaatcaagttatacataggcaaacgatctttattggaagtttaaacacgtcaattgtacacccgagggaggtttttaaagaagccttccgtcgtgcagcagcctctatcatatgtcttcataaccatccctcaggagatcccacgccgagccgtgaagatattgaagtaacaaaacgcttagtagaatgcggccagattatcggaattgaagtgcttgatcatattataataggtgaccataaattcgtgagtttaaaggaaaaaggtcatatttaagactatgctttttacttattttgttttataatgtgatttatgagttttttgtagaaatttatctacaaaaaggataaagatataaaaaacgtactgtttttataatataaattaagaaaaaatgagtccgtgaaaacaagaaaggaagataaataatatgtttggatttggtggatttactcgcgatcttggaatagacttaggaactgcgaacacgcttgtatatgtaaaaggaaaaggtgtagttttacgtgaaccttcagtagtggcgttacaaactgatacgaaacaaatcgttgctgtaggtagcgacgcaaaacaaatgattggtcgtacaccagggaacgttgtggcacttcgcccgatgaaagacggtgtaattgctgattacgaaacaactgcaacaatgatgaaatattacattcaacaagctcaaaaatcaaacggtttcttctcacgtaagccgtatgtaatggtatgtgtaccatctggtattacagctgtagaaagacgtgcagtaatcgatgcgactcgtcaagcgggtgctcgtgatgcttatcctatcgaagagccatttgcagcagcgattggtgcaaacttacctgtttgggaaccaactggtagtatggttgttgatatcggtggtggtacaacagaagttgcaattatttctctaggtggtattgtaacaagccagtcagtccgtgttgctggtgatgatatggacgattcaatcattcagtacattaagaaaagctataacttaatgatcggtgaaagaacagctgaagcattaaaattagaaattggttctgcaggcgagccagaaggtatcgagcctatggaaattcgcggtcgtgatttagtaagtggtttaccaaaaacagtactaattcagccagaagaaattgcagatgcattaaaagatacagtagatgcgattgtagaatcagttaaaaatacgttagaaaaaactccacctgaattagcggctgatattatggaccgcggtatcgtattaacaggtggcggggcattactacgtaatttagataaagtaattagtgaagaaacgaaaatgccagttcttgttgcagaagatccattagattgcgtagcaattggaacaggtaaagcattagacaatatcgatcttttcaaaactgctgctcgataatattgcaaaataaaaatcagtgaaattaagagggtgtgaacgtgccacagtttttcttaaacaaaagattaattgttttgttggttagtattattcttctcgtggcattgattggaatctcattgaaagaacggaacagtttaacatggccagagcagtttgttaaagatactgtcggtgttgtagaacgtgtattccaaaagccagcgaaatacgtagctggattcttcgaaaatgtagaggatgtaaagcgcacgtatgaagagaataaagaattaaaagcaaaattagataattatgcaggtctatcagggaaagtaaaacaattagaagatgataacaagaagctacaagagctaactggtaaaaaagagttaaatagcgggtatactgaaattccagctactgttgtttctcgtaatccagataaatggtacgatttaattggaattgataaaggggcacagcaaggaattaaaaaagatatggctgtagtaacttcacaagggttagttggaagagtgaaaagtgtatctcagtttacatcatcagtagaattactaagttctatgagccgaacaaatcgtgtttctgctattgtacaagggcaagagaaaatctttggattgattgaaggttatgacaaagaaaagcaattacttcttttcacaaagattggctctgatgcaccggtagtgaaagatcaactagttgtaacatctggactgggtgatattttcccgaaaggtcttgtaattggaaaaatcgttgaagttcagccagatgcatatggcttaacaaaaacagcttatgtaaaacctgccgctgatttaaatgacgtagagcatattacggttgctaaacgtgcaacaccttcagcgccattagaataggaggagaagaagagatgatgaagatattaaaaagagcagctcttcctcttttgctcctttttgtgtttctatttgaaaatatgtttgctactgttgttccaacggatgtgttttggaaagacagcatagcagcaccgcatttctttataatcgtcttatgttttattacagtgtattatagtccggtccaagggatttattacggactattatttggcttcttatttgataccgtatacacagaacttgtcgggatatatatttttgcttatccgattttagcttatttagtatatagtgtgatgaaagtactacaattgaatttatttattgttgtttctatcatattagctagcgttgtagcactagagtattatgtgtatggattcttaactttattaggacgtactcatatgccagcgtatgtctttttcacagatcgtctcctttctactttattgttaaatgctattttcttattgatagtttgtttcccactgagacgatatatagtgcgtctttcaaaagcgatggaagaaaaagaaaaaaggattttctaattttatgtcgaattgaatcggtggggtgaactttagtggaagaaaaaaagcaacaaaatgtaacgataaaagggacaaaagatgggataacgcttcatttagatgattgttgttcattctcagaattattggtggaattagacgaaaaactttctacacattactacgatggtgatgggcgctctttaattgaagtgcatgtgaaagtaggaaatcgttatttaacagaagtccaacaagaagagattcgtacgttaattcgtaataaaaagaatcttgttgtggattcaattgaaagtgatgttatcactaaagcagaagcaatagcttggaaagaagaaacagaaattgtccctatttccaaaattgttcgctctggacaagttttacatgtaaaaggaaatttgttgttaattggagatgttaatccaggcggaacggttatcgctggggggaatatttttgtcgtaggatcattaagaggaattgcacatgctgggtattatggggattcggatgctgtaatcgctgcatctgttatgaacccgatgcaacttcgaattagtgatgtggcaatgcgggctccggaagagaaagaagacggagcggaggcggcagaatgtgcgtatattaatgagaacaatcacattgttgtcgatcgcctgcaacttctcactcatctcagacctaatttaacaaagttagaaaggggaattgtatagctgtgggagaggcaatagtaattacatctggaaaaggcggagtaggtaaaactactacatctgcgaacattggtacggccctagcgttatctggaaagaaagtgtgcttaattgacacagatatcggtcttcgaaatttagacgtagtaatggggctggaaaatcgtattgtatttgatcttgttgatgtcgttgaagggcgttgccgtttacctcaggctcttattaaagacaaacgttttgatgatctttatttattacctgcagcacaaacgagtgataaatcagcggtaacacctgaacaaatggatgaattaatacaagtattacgtcaagattatgattacatattaatcgattgtcctgcggggattgagcagggatttaaaaatgcggtagctggtgcggataaagcaatcgttgttacgactccagaagtatcctcaatgcgcgatgcggatcgtattattgggcttttagaaaaagaggatattgaaccaccgaaacttgttattaaccgtgtacgtagtcatatgcttcatgaacaggatatgttagatgttgatgaaattgtacgtacattgtcaatcgagcttcttggtgttgtcgaagatgacgatgaagttattcgagctacaaatacaggtgaacctgtggcgttgcaaccaagcggaaaagcagcgttggcttatcgtaatattgcaagacgcttgttaggtgagaatgtaccattacaagcatttgaacaagaaaaggtatcggtatttgcaaaggtgaaaaacttctttggaatccgttaagagcacttcgcacatatgcgaggtgctttcttttttcttcacacgaatatctttctttcttagctcatacatatgtacaaactgtatacaactgtttctaatgaaattagcttaacgaaagaaaggagacagtatgaagaatagacgcgtagaagaaattaaaaagcggattgcaaaaaggaaggccgagcaagaaaggatggaggaagagcagtattttaacggagggaatttcgatagtgaagcggtatttattgaagatggagaaaaggaaatgcatcctttatttcgaaaggaagtctttttcttcaaagttttattatcagcaatattagttctttcggttgctattttatataagaatgctccttcttcattcaatggagctaaagctgttacagaaaaagtgatgaaagaggaatttcagtttgctactgtagcgaaatggtatgaaaagcaatttggaaaaccgctcgtattctattcgccgaacgagaaaaaagaaggaagtattcagcaaaaggattatgcaattcctgcttctggaaaggtaatgcaagggtttcaaaaaaatggccaaggtgtatttgtccaaacagctacaaatgcaaaagtggagtcagtaaatgaagggttagttgtttttgcaggcaagaaagaggaacttggaaatacagttcaaattcaacatgcagatggtacggagtcatggtatgcaaacttaaacgatatgtcagtgaaattatatgattacgtttcaaagaaacaaaaaattggaacggtgagtaatgatacaaatgataaaaacggaaagttttatttcgcgataaaaaagaatgaaaaatttattgatccgatccaggtgatatcatttgattaaatatagggacgttttaacgaaaatttccgtgcatccattattttgggttattattgtcattggtatttttactgcgcgttttaaagagttactactgttattttgtattgttcttattcatgaacttgggcatgcttttgcagcagcacactataattggcgtataaaaagaattcaacttttgccgtttggtggcgtggccgagcttgaggaacatggtaataagtcattgaaagaggaacttgttgtcgtaattgcaggaccgattcaacatgtttggatgatgctggtaggttatatgttgttcgaagtcggttggctgaatacagatttatattatttctttatgtggaataatataattattttagcatttaatttactccctatttggccgttagatggcgggaaagtattgtttaatgtattatcatatcgtttcccttatttacaagcacatgaaaagatgatgcaattgtcatgtgttttttttggtgtaatattaggatggcagttactctggaatagtaacaatattatgatgtggatactactcatatttttagcagtgtcattatatcaagagtggaaacaaagacggtatgcatttatgcgttttttattagaacgttattatggaaacaaaagaggaatcgaaaagattgcacctattgaagtgcaaacggaagatcgtttatatacgatctttacaaaatttcgtagaggatataagcattctattatcgtccgtggaaaatataaagagcattacacattggatgaaaatgaattgctctatgcatattttactgaaaaacgaacaacttcatcagttgaagaattaatcggttagtgttgacgatagcactaaccttttattattgtaaaagcaaagaagattataaagtgaggaaataattttgaaaacgttatatgtgaattacgctggttcggaaaagcgcgttgcaattgaagagaagaaaaaaattgttgagtttttatggaaacgtaatgaagagcaagagattgttgggcatatttatgttggacgtgtcgtaagaacaattgctggaatgaatgcagcttttgtaaacatcggtttagaaaaacatgcttacctttcatacgatgatgtaccatcttcttatcgtatacatgaagggcaagcgatactcgtacaagttgtgaaagaggcaattgatacgaaagggcctaaattgacagcgaatatagaatttaccgggaaatatgtcgtttatatgccgtttgatgagatgcgcgctgtttctcgaaaaataaaaaataataaaagaagacaacagttactccaaattgaaatagagggaacggggggatacattttccgctctgcttctgaaaaaggagcaattgaagaaatacaagctgaaatgcaagggttacaacagttgtatgaagagttaaaaagaaaagagggccaaggaaaggcgccgttattacttcatcgaccggcgacctttttagatcgtgtatttcaagagaatccaattgaaaccattgaaaaagtagttgtagatacaagaagtatagtaaaagaattagaagacaaagttggaaaagaaaaagtatctttttataatgaaaagtcttcgatgtttaaccattttggaatagagcgtgaaattgagaaagcactccaaaaaattgtgtggcttccaaatggtgcttatttaattgtagaacaaatggagacgatgactgtaattgatgtgaatacgggcaagtttacgggaaaacaaaatttacaagatacagtacttcgcacaaatgagatggcagctgaagaaattgcacgccaattaagacttcgtgatattggtggtatgatattaattgattttattaatatgaaaaaaagagaagataaagaaaaggtaagagaatgtcttatagctgctatgcaagatgaccgcacatatacaagggtgctcggctttacggagctagggattttggaaatgacacgtaaacgtaaaaagcattctttacgggacgtattattaaaagagtgtgtaccttgcaaagcgacgggttatgtgatgtcgcatgaaacaattgcgtatgagttagagagagaactaatcacatatggcaatatagaagatgaagcggtattaatcgctgcgcctaaagaactgcaaaaacagtttttgcaaaaagaattacaaaaaaatattccatttgaaatttatttcaaagatgataatatcgaaaagtatgctatcgttcgttttggaagtaaaaaagaaattgtagagcggaaaaaatagttagcagaacatttattgacaaccgtctatgattcatgataacatctttatgttatagtttatagcacctaaacggctatatgctacaaccgcacaagacaggttccctaaaggcatttatgtctacctcgtttttggcgagtcttagtaattaagaggaggtgcaagtatgtacgcaattatcgaaacaggtggaaaacaaattaaagttgaagctggtcaagcaatctacattgaaaaattagatgttgaagctggtgaaactgttacttttgacaaagttcttttcgttggtggcgaaaacgttaaagttggtagcccagttgtagaaggtgcaacagttactgcgaaagttgaaaaacaaggtcgcgctaagaaaattatcgttttcaaatacaaagcgaaaaagaacaatcgtaagaaacaaggtcatcgtcaaccttacactaagctagttgttgaagctatcaacgcttaattctggttaacatgattaaaattacgataagtcgcacgaaattaggaagtatccaatcatttaaaatgactggacatgccgattatgcgccacatggacaagaccttgtctgtgctggaactacagcggttgtgtttggttctataaatgcagtggaagaactttgtaatgtgcaagcaactattgaactcggaagtgatggcggattcttaacatatgaattgcctaatgatttagacgttcatacagcagaaaaagcacaaacgcttttagaaggattagttgtttcgcttaagacgatcgaacttgattacggaaagtatatccgtttaatagaaaaagtgcaggaggtgtaacgtatgttaagattagatcttcagtttttcgcatctaagaaaggtgtaggtagtacaaagaacggtcgtgactctcagtcaaaacgtcttggtgctaaacgcgcagatggtcaaacggttacaggtggttcaattctttaccgtcaacgcggtacaaaaatttatccaggtgttaacgttggtcgtggtggcgatgacactttatacgcgaaagttgacggcgtagtacgctttgagcgtcttggtcgtgaccgcaaacaagtgagcgtatatcctgttgctcaagaagcataagaactcacggaaaactctaacctgagtgcaggttagagtttttctatattaaggggtatctaaatgaatgaaaaatggacaattatagatgcattgcgccattcaagacatgattggctcaatcgtatgcagatggtgaaaggaaacctttcccttggaaaagtggaagaaattcatagtctcatcgatcgttttgtccaagaagcgagacaagaatccaatctgatggggctatcaatgcctttattttcagagtggattttaacatataattggaaacagcagccgtgcttattggagtacgaagtattagggaaattacataacttatctcacttagatgagactgtatgtacatggacgaatcaatttttctcgatgcttcagcatagtttagacgtatatgttgaaaattatgtttgtatcacaattgaatgtgacgcggataatgctcgtttcttttttgattttcgtggtaagctaacgagtgtagaagaactacagaattggcttgcgacccaaaacaataaatggtattccatttcttatacagtgcgagacgaagaagtctcagttatattacaaccaattgaaaaaagtgtggtgaaataatgtttgtagatcaggtcaagatatatgtaaaaggcggcgacggtggtaacggtatggttgcgtatcgtcgtgagaagtatgtaccaaaaggtggcccagcaggtggcgacggcggtaaaggtgcagatgttgttttcgtagttgaggaaggcttacgtacattaatggacttccgctaccaacgtcatttcaaagctgatcgcggtcagcacggaatgagtaaaggtcagcacggacgtaaatctgaagatttacttgtaaaggttccaccaggaacagtagtaaaagatgaaaaaactggtcaaattcttgccgatttagtaacgcatggacaaactgctgtaattgcaaaaggtggccgcggtggccgtggtaactcacgttttgcaacagctacgaacccagcgccagaaatcgctgagaacggggaaccaggtcaagagcgtgatgttattctagaacttaaagtactagcagacgttggacttgttggattcccaagtgtaggtaaatctacattattatctgttgtatcatcagcgcgtccgaaaattgcagagtatcacttcacaacaatcgttccaaatcttggtgttgttgaaactggtgataaccgcagcttcgttatggctgaccttccaggactaattgaaggcgcacatgctggcgtcggacttggacaccaattcttacgtcatattgagcgtacacgtgtaatcgtgcatgttattgatatgtctggtttagaaggccgtgatccatatgaagattacgtaacgattaataatgaattaaaagaatacaatcttcgcttaactgagcgtccacaagttgttgttgcaaacaaaatggatatgccagatgcagaagaaaacttacaagcatttaaagagaaagtgggagacgaagtaaaaatcttcccaatctcagctgtaacaagacaaggtgttcgtgacttattgtttgaagtagcgaacttaatagaaacaacaccagaattcccaatacatgaagttgcggatgagtctgatacaagtgtaatgtacaaatttgatactgaaggtgttaaatttgaaattacacgtgaaagtgatggcacgtttgttatctctggttacgatattgagaaaacattcaagatgacagacttctcacgtgatgaatctgtacgtcgtttcgctcgtcaaatgcgcggaatgggtattgatgaagcgcttcgtgcacgtggtgcaaaagacggagatattgtaaaaattcttgaatatgaatttgaatttatcgattaagactgccgaaatacggcagtctttttttatatcgtaaaaatcggatttatataggaaaaaatccccactaattaaattttcaatttataataaaaaggggagtggttttagaagaatttttttatggggagaaaacgaacatgtataaaatattaattgtagaagatgatgagaaaatcgcgggaatattagaagagcatttagaaaggtatggctatcaatcatttagagcaagtgatttacgtcaaataaaagatgagtttgtaaaagtgaatcctcatctcgtgttacttgatattaatttaccgtactttgacggtttttattggtgtcgtcaaattcgtactgtatcgaatgcaccaattatttttgtttctgcaagaacaggagaaatggatcaagtaatggcgattgaaaatggcggcgatgattatattacgaagccattccatttagatatcgtaatggcaaaggtgaagagtgcacttcgccgtggttacggagagtatgcttctgccgctgagagtgattgtttaggtgtaaatggactgttgttattcccgtctcagcatattgttgagtggcaaggacaacaaactgaactgacaaaaaatgagttttacttattagagtgtttaatgaaacaggtgaatcaatatgtaacgcgcgaagaactgttagaagctctatgggatgaagtagcatttgtggatgataatacattaaccgtaaatgtaaaacgtgtaaggaagaaactagaggagttaggcattaaaaatgcaattgtaacgaaacgtggatatggttatgcgctttttacggagtggggcgaagggcatgaaggttaaaaattaccttatgggccgcttttctttaattctttcttatattgttagcctttgtttatttgggctcgttttacagctgcaaagtcttttagaaaagaaatccattgattggagtacgtggttatatggacttttattaggaacagttgtgtttactgtatacctcatttacgattaccgaaaacggagtgtgtttttaaagaggatcgaaaagtatgttactgatggaaatacattacatgactctttacttattgatgaatcttatacatcagagcaagaaatggtcgttgaatcttttacgttattaagacagcaatatatgaatgaagttcataaacagcatgcgaaagagcaacagcaaatgatatttatgaaccaatggattcaccaaatgaaaacaccagtatctgttattgaattattgctgcaaaagtttggcaaagagcatcgtgaggcaagagcaacagttgaaagtattcgtgaagaaaataaccgtatactaaatggtttagatttagcgttacatatggcaagactagagcagtttgcgaaagattataagatagaagtagtaaatgttatagatgtcgtgcgaggtattattaatgaaaatcggaaatcctttattcaatcgtctgtatttccgaaagtgatgtttgaagaagatacttgtatggttgcatctgatagaaaatggctgagtattgctataggtcaaattgttgtaaacgcaatcaagtatacaaaaatttcagcggcagagaaaaaagaaattcaatttcaaattgaagagaaaaatcaaaaggtgttattacatattaaggacaatggaattggtattccagagcaagacgtaaagcgcatatttgatccattttttacgggaataaatggacgtaaaacgagagaagcgactgggatgggcttatatattacgaaggaaatttgcgataatttacatcatggaatgtatgtccaatcggctgaaggagaagggacaacattcacgttccaatttgcaaaagatgaagaatatcatacattgatgagaaaaatgacaaaactgtaagataacaaaacgttttgtaagggaaatcactcgtttctttttcttatttttcttatagtaaatgtaagaagaaaacacgtagggggattagaaatgagtgttcttgaagtaaaaggattaacgaaggtgtaccaatcaaaaggttcagtagcgacgactgctttaaacgatataaattttaaaatagaagaaggcgaatttgtagggattatgggtccttcaggaagtgggaaaacgacgcttttaaatttattagcaacaattgataagcaaacttcaggtcatgtgcttgtaaatggtgaagaaattaatcaaatgcgtgctgcaaaattagcggagtttcgccgtacacatttagggttcatcttccaagattttaatttacttgatacgttatccattaaagaaaacattattttaccacttgtaatggcgaagaaatctgtaaatgaaatcgatgcgaaagtactagaaattgcgaagtttttaaacatcgaagaaattttaaataaaaaagtatacgaagtatctgggggacaacaacaacgtgcagcagcagcgagagcaatcattcatgaaccgacgttaattttagcagatgagccaactggaaacttagactcgaagtcagcaaaatcgctaatgggtgctctgcaagatttacacgagcaaaagaaagtaacgattgcaatggttacgcacgatccagtagcggctagttattgtgaacgtatccttttcatacgcgatggagaaattttctcggaaatacataaaggaagaacgaaacaagcctttttccaagaaatcctggacgtacttgcgatgctaggaggagaatatcatgaactttcgccagctcgcgcttaataacgtaaaaggaaattggcgtaactataaagcgtttcttataagtagttgtttatcgattgtcgtatttttcatgtatgcttcttttatttatcatccagatgtcgtaagcggtaatattagtatgagaaagatgatcacaaaaggattagaatcgatgaattatattgtggtcatcttctcggcactctttattttatatgcaaattcaacgtttttacgagcaagaaaaaaagagtttggtctactaacattaataggcggaacgaaatcgcagctcggccgaatgattatattagagcaactgatgttaggtagtattgcaattgtagttggtattggggttgggatgctttgttcaaaattatttttccaagcgttaagcgtattattaaaaatagataagacacttccacttgtttggaatagtaaagcagttcttattacagctggtgtatactttattctatttttaatcctatcattgtttagtgtttggacagtaggacgcttgcaaattattgatttattaagagaggcaagaaagcaaaaagtagagccgtttgcatttacatggttatgtgtagttggtataggatgtattattgttgcatatgtacttagcttccaagtaacgtttctgaatttcctcatcctttttttaccggtggtgggactgacaattggcggaacgtatttactatttacacaaggtagtacagttgtattaaaagcattacaaaaaagaaagcaatctttttatacgtacccaaatatgttcgtccttagcaaccttatttataaaatgaaagataatgctcgttttctatttgtaatttctatcattacggcggtagtatcttcagcggtgggtacactgtacgtatattttgaaaatatgagtgcgaaaacggtagaacttacaccacatgctatttcatatgaggaaaaggggttaaatacgcataaccttattaatgaagaaaaggtacaggagcttgtgaagagacacgggtttgaagatgcgcgaaaagtaacatacgttaaactaccggcaacacagaaaataacgttgtttaatagtgaacatgaagtaccgatgacgattatttcagaaaaagaatataatgcagaagtgcgcaaacaaaagagagagcaacctacagaagttcataatgcaccaggtagtgcaacgatggttatggttgatatgtcaaatgaactgatgaagatagatcgtacgaaaccgtatgaatttacaattaacggacaaaagcagtctgttcaattaaataatccaacgcagtattctgtttttaatgatagtgaatatctcattgtaaatgatcaagattttgagaaatatgcaaaactcgtaccagatgaagaaaagtcgaaatattacggttattatattgaggattggaaaagtacagaaaatcttgtattagatttgaaaaatgaaattgtaccagaaaagcaaggggaattgagaaattcagtgtttgcgtataaggatataagagaaggtggagcaattacaatgttcatcggtttcttcgtagcggtactgttcttcttcttcgcttgtagtatgacatactttaaatggtttaacgataaagaacaagatcgtattcaatttaaatcgttaaagagaattggtatgacagataaagaaattcgcaaaattgcgattcgacaaatgggagttatcttctttatcccaattttaatcggttccattcatagtggatttgctcttcatacgttagggaaaatgctttatattaatttatggaaatcaggtgcgcttgtaattggagcatacattttagcttctgccatttactttatgatcgcgcaaagaggatatttaaaacacgtaaaaagctaggggaacctctagctttttgcctatgtagtaagttacaggaggacgatagatgaacattcggcaactagcgctgcaaaatataaaaggaaattggcgtaattataaagtgtttttcttaagtagttgttttgcaatatttgcttcttacgcatatatgtctgtcattgtgcatccatatatgcaagagacgatgtggtatcaaaacgtacgctggggacttatcatatgtaatgttataatcatttcttttttcgtcatatttattttgtactctacttctattttcatagaagcacgtaagaaagaattagggttatatatgttaatgggagcaacgaagtctaacgtaataggagtgattatgaccgagcaaattttaatcggggtcttcgcgaatattttcggtattgggcttggtatgatatttttaaagctcttttttatggtatttagtatgttactggggcttccgaaagaactccctgtcatatttgacgtaagggcgattggtgtaacatttattacatatatggtcgtttttattttgttatcttttataagtgctttacgtatatggaatataaaaatcattcggttattgaaagaatttcgaacagataaaaaagagaagaaaacatcaaagtggctctgtttattcggttttgcttgtttagtgggcgggtatgcattggcgctacaagtgacgatggctacgatagcgatatactttttccctgtgtctatacttgtcttttttggaacgtacttttcttttacacatggagctacccaagtgttagaaataataaagagaaataaaaagattatgtatacatatccttatttatttatagtgaatcaattgtcacatcgaatgaaggaaaatggtcgctttttctttctgatgtctatggcaacgacgtttgtagttacagcaacaggtacggtgttcttatatttttctagcatgcaagatatgtggcgaactggaggggtacactcgttttcgtacatagaaaaaggtatttctactcatgaagtctttgaggaaggtgcggttgaaaaattactgcatcaatatgggtatgacgattttcaatatatgagttttgttggagtgtatgcatcctttcagtctagtaaaggagaaacaacaatagtaccgcttataaaagaaagtgaatataaccaagaagcaaggaaacaaaaacaaaaaatgtatcgtcctaaaaaaggtacagtgacacttgtttattataataaatacaataattcgaatgtatataatcaaaaagagattgaattgcaagtaatgaatcaaccatatcaattcgtatttaacggtcagaaagaaggggttcaatttaaccatcacccttcgtacattaatggtctgttcttcgttatgaatgatgaagattttgatagtatagcaaatcaggttcctgattctgaaaaaatgatatatagaggctacacattaccaaatatcgaaaagacgaagaaattaaatgaagatttacggaaacatatgaaacaagataataataatgcatttcgaagcaatatggagttgtatgtaaatgtgaaagaaggcggcgatattactctatttgtaggctcatttattagtatattattctttcttacttcatgtagtatcgtttattttaaatggttccataatattgcatcggaccgaaagcagtatggtgcactctctaaacttggaatgacgaaggaagaagtatggaaaatttctcgttggcaattatgtatgctattttttgcgccaattatagtagggagtatgcatagtgcagttgcgttatatacgtttcataatacgctttttatggatggatcattaagaaaagtaggtttgttcattctgttttatatcgcagcatgtatcatttatttcttcttcgctcaaagagaatataagaaacatttagactagcgaacgctagtctttttttaatattcgaaatttacatagaagaatataaaaaagtatggtataacagtaagaaaacgaaaaagaggggaaaagacgatgattcgagtaggatatttaggaccagaagcaacatttacaaatatggcggtgagtcgtttttttccggaagcagagcatgtaccatatcgaacgattccagattgtatagatgcagctgcaaatgaaaatgtagacttcgcagttgtaccgttagaaaatgcaatagaaggttcagtgaatataacggttgattaccttgtacatgagcagccgctttccattgtaggagaaattacagtaccaattcagcagcatttacttgtacatccgcagtatgcagaagtgtgggatgaagtatatgcagtgcattctcatccgcatgccattgcacagtgccataaatttttaaatgaagaattaaaaggagtaactgttcgagatatgacatctacaagtgctgctgcgcaatatgtgaaagaacatcctgaagagaaaattgccgctattgcaaatgaagcggctgcagaaaaatacggattaacaattgtgagacgtagtattcatacgcataaaaataatcacacacgtttcttggtactccataagaaaaagaaagcagtactcccgaataacggagagaatcgcggagagaaaacgacgcttatgataacgttacctgcagattatgcaggtgccctatatcaagtgttatcagctttcgcatggagaaaattaaacttatcaaaaatcgaatcgcgtccgatgaaaacaggtcttggaaattactttttcttaattgatgttgataaagcatacgatgacgtattattgccaggcgtaacgatggaacttgaagcactcggtttttctgttactgtgctggggagttattcttcttattggttgtaagatgtagatggaatgttggtatttgtctaatcgtcaatatcatttcattgcctaatatattttttaatagattaataaaatcccacctgcagaaggtgggattctttattttaacttcgcaagacgatcttctaactgaccacgccaaatatcagctagttctggaacagcaagaattttttcaatgccatctttatcttttctattatgaaaataaatttcgttagagaacaagacagaaacattgctcggttgacgttctagtaatgtaattttagaatctttacgtacagtaccttcttgaagaacgcggcataggtagcctgtaaatccagttgctacaatgcgtggcagtatgccagggatgccaagacgttttgaaattgtgctacaaggtactcttgcttgtgtcacttgaatgattgtttcacctagttgatatgtatctccgatgcaaacatcacgctctaacatatttgttacggtaatgttttcgccaaatgtggaagctggaagcgtagtttgaaattcctcttcccatagtgcgtaatgctcgtgtgggtacacacaaacagcacgatcaggaccgccgtgatgttttaaatccgctacgtcatcaccaagaaatccgtcttttgagagaaaggcctcttctgtaggatctttacatatacctgttatcatttctttatcttcgccatatttcatttgtttcggtttgccaatgctaaagtgaacgagttcaattcccatgtttgatctcctttacgattgattacaatattatagcattaaaaaagcacagaggatgataaaaaactctgtgctttacattaataaacgagaaatcctgctttatctaacgcctcacaagcagcatctaacttttctttagaatctgcttcaattgtatgtaagtgaataccgtctgttagttgcgatagataggaagcatttgtgttttcgattttttgtaaatattgctctacatcaaatcgattacttaccataattgatgctgttaagtcgccgtatacaggatgctcaacttttacatctttaattgtaacgccatggtcaacaagcattgtaagttcttgacgtacttctgctggtttgtgctggcatacgattacgcgttcaaaagcttgttgtttctcttgtggttttaaatataaatagccttgggcagtcgcaataattggttcgtttcgtgctttaagcaaggaaatatcttgcacgataacttgtctacttacgtttgtcttcttcgatagttcattcccagataacggctcatttgcagcgagaagccactgaaggataagctgtcgtctttcttcgcctaaaatctttttttgttcattttgtttcattatgatttaacacctctataaaattgatttccaattgtgtgtagtgcatgaatagtagtatcaatttgatctttcgttgtttgttgtccgaaagagaagcggacatattgtttggcctcttcatacgtttttccaattgcaagcatagttttcgaaggttcttgtttaccgacttggcaagcacttccggtggaaatggcgataccatggcgattacattctaacatagtatattgaccttctattccttttattgtaaccccaacaatatgtggtaaacaagaagtagaatgaccttctacttcaatttctagcggaagtgtttgtatttgccctaaaaagtaggagcgtaactctttaaaacgtaaactttcttcccattgagtttttaatatattttcagcagctgttaaaaaagatgcgatgccgggaacgttcactgtacctgggcgaaatcccttttcgtgagaagttcctggaaatacttgctcccagcgcgattgcggatttatgtagcaagcgccgacaccttttggtccgtatattttatgtgctgaaacagaaagactatcaatccccatctcaaaaacatggataggcagtttaccaaacgtttgcacacaatccgtatgaaataaaacattatatttttttaaaagtgccccaatttctgtaatgttttgaacggttccgatttcagagtttccatgctgtatacttgctagcacagtatcttctgtaatagctgcctctaaatctactaaacaaatgagtccatttttatcaacaggaatttcagtgatcgtatagccttttgattttagagattgaaaataacttcgaatggatgcatgttccataggtgtcgtaataatatgcttcttattttgggcatttagaagtgattggatcgcaagatagttcgattccgatccaccacttgtgaaaaatactccttgttcttttcctccaatcatttccgcaaatgtttttcggcaaacttgtaataaagaagaagccgttcctccaatatcatgtaagctttgttcatttccgaagtattgcgacgctgctttcatatatgtttgtaacgcttcctcgctcataggtgtagtagctgcatagtcaagatatatcatcatgtaagttcctctctctagtaagagttacatttcttttactttttaaatggtagtgaaaataagaattataaaaaaactcttgtcattattttaaaattatgtaaatataggtgtcaagacagttgaaaagtgtaaagtaggaggcaacaattatgccaagcgcagatgtcttaattattggaagtggcgttgcggcacttcgtgttgcaaaagagatttgtcacgaaaagaatgtgattattatcacaaaggagacgaaacgtaataataatacacatttagctcaaggtggaattgccgcagcggtagctacatatgacaatcctaatgatcattttgaagatacattagtagcagggtgtcattataacaatgaagaagtggtccgttatttagtcgaggaaggaccgaaagaaattaataaccttattgagaatggaatgaaatttgatggagatgaaacaggtcctcatcttggaaaagaaggagcgcatcgaaaacgtcgtattttacatgcaggtggcgatgcaacaggaaagaatttattagagcatcttattcaagaagtagctccatacgttacggtagtggaacaggaaatggtgctcgattttattatagaaaaagataaatgtgttggggctttaactcgcaacaataaaggagaattgaaacgttacaatgcagattgtacggtgttagcttcaggcggtattggcggtttatacgcctttacttctaatgatgagacgattacaggcgatggacttgcaatggtgtaccgtgcaggcggagagcttgtagatttagagtttatacaatttcatccgacgatgttatacgcgggtgggcgttgttccggcctcgtgtccgaagctgttcgcggagaaggagctgtccttataaatggaaaagggcagcgttttatgatggatatacattccgaacaggatctagcacctcgtgatgtagtcgcacgggctattcatgaacagctacttgcgggtgaaaaagtgtacttaaacatcgaaatgattcaaaactttgaacaacgctttccgaccgtgtcatcgatatgtaaaacaaatggagtcgatataaataaaaaacttattccagtcgtgcctggtactcattttcacatgggcggcgtgaaaacgaactgtgatggagagacgtctattccgaacttatacgcagtcggtgaagtagcttgtaacggagttcatggtgcaaatagattagctagtaattcattattagaaggtcttgtgtttggaaaaagaaccggacgacacattttatctagagagacaaaagaaaaggtgaacatgctagctgaaaaggaaccaaagttcatcgttctgaatcatttaccgacgaaagaagaaatacaaaaatgcatgatgaaatatgttgggattgtgcgaacagagcaaagtttatcttatgcgaagagatggtttagtaagtatggtgttcgaaatatgatattacaacatgatgttcttacgaatgaagagataacacttattaatatgttaacggcttgtgagcttatagttgtgtcagccttgcaaagagaagaaagtattggcgggcattaccggagtgattatccagatagaaatataggaaagaaagagattgttcgagtaaagagaaaattacaacttgtgtgatgaggggaagagaggctttatgaacacgataaaagttaaagaagcattaaaccgattttttttagaagatataggagaaagagatgtaacatctcagcttatttttccagataacttgctttcgaaaggaacgtttcttgcgaaggatacaggggtctttgcaggatgtttagtaattgaatcaggatttaaattaattgatgagagaattgaaatagagcttcataaaaaagatggggatcttgtagaaaaaggagaaattattgcaacagtgcaaggtccaatcgcatcgttattaacagcagagcgcgttatattaaatgttattcagcgtatgagcggaatagcgacgatgacgcgtaaagcggttcttgctttagatagcagtcatactcgcatttgtgatacacgaaaaacgatgccaggactacgtatgtttgataagtatggagtcgtgtgcggcggtggatttaatcatcgcttcggtttatatgatggtgtcatgattaaagacaatcatattgcgtttgctggttctattacaaaagctgttacatcagtgaaagaaaagttaggacatatggtgaaagtagaagtagaaacagaaactgaggaacaggtgagagaggctgttgctgctggtgcggatattattatgttcgataatcgtacgccagatgaaatccgggagttttcaaaaattgtaccaagcgctatcgttacagaagcttcagggggcattacaattaaagatttatcaaaatacggaaaaacaggggtagattatatttcacttggagcgttaacacattcagtgaaagcacttgatattagtttcaatattgaagagtaaggaaagtggcttagagggggagaaacgtatatgagtattttagaacaagtacagtcaattgaaacgatgttaccagagcgttattacacgatgtcaacggaagatatggaaaagcgtgttcgtgaaattaaagagaaaatggggaaaatgttattcattccagggcatcattatcaaaaagatgaagtggtacaattttcagatgcagcaggggattcacttcagcttgcgcaagttgcagcgagcaataaagatgcaaaatatattgtgttttgcggggtgcactttatggcggaaacagcagatatgttaactacagatgatcaagttgtcatcttaccagatatgcgtgcaggttgttcgatggcggatatggcagatattgaacaaacagaaagagcatggaaagagctcacgaaattatttggagatacgatgattccgttaacatatgtgaactctacagctgcaattaaagcgttttgtggtcgtaacggaggagcaacagtaacttcttctaatgcaaagcaaatggtatcttgggcgtttactcaaaaagaacgtctcgtctttttaccagaccaacatttagggagaaatacagcgcacaatctaggtatcccgttagataaaatggcagtatgggacccacacacagattcattagagtacgatggggatatagaagaaattcaagtgattttatggaaaggacattgttctgttcatcaaaattttacagtgaagaatattgagagtgtacgaaaaaatcattctaatatgaatattattgtacatccagaatgttgctatgaagttgtagctgcttcagattatgcaggctcaacgaaatatattattgatatgattgaatcagcgccatctagtagcaaatgggcgattggtacagaaatgaatttagtaaatcgaattattaagcaacatccagataaagaaattgtttcgcttaatccatttatgtgtccgtgcttaacgatgaatcgaattgatctgcctcacttattatggacacttgaaacgatagaaagaggagaagaaattaacgttattagcgtagacaaacaagtaacggcagaagcagttcttgcattaaatcgtatgttagagcgtgtgtaaagcaacggtattcccgttgctttttttcatacatataatcataacgagaacgaaatgggcatacattgttttgaagaaatcattgtggttctttatgcttattccacttcgaatgatattgaaaatcgaagaagtgataaaagtgaaaagaagttaatgttatttagaaagagttacttcaagagatttgttacttatagataagttatacaggagggggaaaatttgaaaattcatatcgtgcaaaaaggggataccctttggaaaattgcgaaaaagtacggagtggattttgacacgttgaaaaaaacaaatacacaacttagtaatccagatttaatcatgccaggtatgaaaattaaagtgccatcaaagagtgttcacatgaaacaacaggctggagcaggttcagcgcctccaaagcaatacgtaaaagaagtgcagcaaaaagaatttgcagcaacaccaactccgcttggaatagaagatgaggaagaagttacgtatcaatcagcaccaattacacagcagccagctatgcaacaaacacaaaaagaagtgcaagtaaaaccgcagaaagagctgcaagtaaagccacaaaaagaagtacaggtgaaaccacagaaggagatgcaggtaaagccgcaaaaagaagtacaggtgaaaccgcaaaaagaggtgcaaaaagaacagccaattcaaaaagaaaaaccgtctgttattcaaaaaccacctgtgatagaaaaacaaaaaccggcggaaaaagaaaacacgaagttttcggtaaatgtattaccgcagccgccacaaccaccaataaaaccgaaaaaagaatataaaatttcagatgtaataaaaaaaggaagcgagttaattgctcctcaaattagtaaaatgaaacctaacaatatcatttctccgcaaacgaaaaaaaataatataatatcgccgcaagtgaaaaaagaaaatgtagggaatatagtgtcgccgcaagtgaaaaaagaaaatgtagggaatatagtgtcgccgcaagtgaagaaagagaatgtagggaatatagtgtcaccacaagtgaaaaaagaaaatgtaggaaatatagtgtcgccgcaagtgaaaaaagaaaatgtagggaatatagtgtcaccacaagtgaagaaagagaatgtaggaaatatagtgtcaccacaagtgaagaaagagaatgtaggaaatatagtatcgccaaatgtatcgaaagaaaatgtagttattccacaagtcataccgccaaatattcaaatgccaaatataatgccaatcatggataacaaccaaccaccgaatataatgccaattatggataacaatcaaatgccgaatatgatgccaattatggataacaatcaaccaccgaatatgatgccaatcatggataacaatcaaatgccgaatatgatgccaattatggataacaatcaaatgccgaatataatgccaattatggataataaccaaatgccgaatatgatgccaatcatggataacaatcaaatgccgaatatgatgccaattatggataacaatcaaatgccgaatataatgccaattatggataataaccaaatgccgaatatgatgccaatcatggataacaatcaaatgccgaatatgatgccaattatggataacaatcaaatgccgaatatgatgccaatcatggataacaatcaaatgccgaatataatgccaattatggataacaatcaaatgccgaatatgatgccgagtatggataacaatcaaccaccaaatatgatgccctatcaaatgcccatgatgccgccgaatccgtattatcaacaaccaaatccatatcaaatgccatatcagcaaggagcgccgtttggaccgcaacatacgtctatgccaaacccgaatatgatgccaatggataataacatgccgccgcttgtgcagggtgaggaagattgtggatgcggaggagaaagtagactatatagtccacaaccaggcggtccgcaatatgcgaatcctttatattatcaaccaactcagtctgcatatgcaccacagccaggaacgatgtattatcaaccagatccaccaaatgtatttggagagcccgtttcagaagaagaggacgaagaagaagtttaaaaaggcgggagtattcccgccttttttgcattcctgttaattaagaaaaggcagtttttttatgaagtgctagaaaattcccagtgaaatattaacagtgtaaaaaccttctctgttactcatcataagagggagcttttcagtagagaagctcattctaacagagggggtttttgtattgaatacgaaagtaaaagtgattgctgcttctttgttagttactagtgcattagctgcatgtggtacaccaaaaaacaatgcaatggatggacgtaactacaattacgagcgtacatcttataatgatacacaccagtatcgtgataatgtgacgcgtaatgatcgttatacagattatgtaacatatagaaatggtcgtaacgatacaggatacaattattaccgtgatgtaaattacaatggacaaattgctaatccgcatccaactcgtaatattacaatgaacaattcatacattaacaatgatggtaaaacagctgaaagaataacaaatcgtgtgaaacgtatgaataacgtagaccgtgtgtctacagttgtatatggaaacgatgtagcgattgcggtaaaaccacgtaacacagtgacaaatgaaacggcgatggcgaacgaaattcgtcaagctgttgcaaatgaagttggaaacagaaacgtatatgtttctgtaagaaatgatatgtttactcgtgtcgatgcaatgagtacgcgtctacgtaacggtacagttacaaacgattttaatcgtgatataggaaatatgttcagagacattcgttacggtttaactggtacagtgcgatagcaaaacaaaagaggaagggggagcccttcctctttattcattttcgtcttgtaaacgacgttttttaataaaataactaacggaataagaacctaaaaagcatatgaagagaataccacctgttaaaatagcttcaaatagggggctttctggactgaaaatgatataaataatagccataacgattcctacaataagagagcgtaaaacaattttgtaataaggagttaattttatctccttttcactttcttctacatcaattgaaacacttaactgtaaataactaaggattatactcgtaagaataaatactagccataatggagatttcgtaatttgatctattccttcagtgaatccgatatagcctaaaataccgattataccaagtgattgaaaaagaaaagcaatacgtacgttttttaacgtttgcagaatgagacgttcatcctttatttttttcacactacccatctcctgtttattatgatttcgctgttacattaattgtaacatatacattacatttatcaatttataatttacatataatttgtttagatgaaagaggaaataaaatatttttataaacatgttgcacttatactttattaatgttatattagcaaagcgatgagctaatttacgtaagacgagagatatgcttaagtgctaaacacgcgaatgtggtcgcctggtctctcgccgtaaacgcatcaagacgcctgctttgcaggcgtctttcattttatataaaagtaaatgatacatgcagatgaggtgaatccttatctgcattttttatattttcgaaagaaatataatatggataaaacccccatttccggaaaaactactaatgaaagtatgatcttgcctaaaagaggtgaacggaaatgaaatggatactgattgcgatgcaagctttcgttataatgttttgtttcgtttatgaaacgaatgtgaaggcggaagggccagtaccagaagtgacgaaaaaagaacctgaggttacaattttattagagcgtatgtatgttgatggcgaagtaagcgaagaaatacttacagaaaaagtgacggatttagaaaagtttttacagcagtataaagaatggcagctcgttgatcgtgatgatgtacaaattgtattgcaaaagaaagttgatgatatttctccgttattgaaaacgagcgggtattttggtgtttcagaggaagggatattacaaattttcaaaggtgtgccaaaaaatgataatgcgatccattctttctttcaaattgatatgaaaaagcttgagagctatgaacgtgcgaaattgaaacgtggcattcgtattaaatcaaaagaaggttttgtgaagacgattgaaaaaatgaagcaatacgcagttcaaagtaagaaaaaaagcagctcatggtgagctgctttttttcttatttatttttagctaaaatttcttttgcgatttcatcaattagcatatcttttccgattggattgaatgctttcgtattgaagacttcatttaatacttcatatacgtgattatttttaactgctttattgtctttccaaacggcactgtttttgtagtcttcgtaaactttatcagcttcgccgccgaagtttacaataaacatttggtcaggctggaatgcaactagaccttctagtgatacttgcgccatcgtttgttttaaatccgtaccttttgttgctggaagttttaagtcattaaagatgatgtcaccgtatccgaagctaccgtatacacggaagttttgtggtgtaactgcaacgaacataaagttctcatcttttgttttctctttaatttttttagataaagagtctgctttcttatcgtagtctgcaatccatttgtctgctttcttctcttcgtcaaatagcttacctacttctttaaacttaccacgccagtcttctaagtttgtttctagaacaactgtaggtgcaaccttttctagttgatcataaatttttaattgccggttgtttaaaataattaagtctggttttaaagcagtaacagcttctaaatcaactttaggtgcccagtaccaacctactgcttttactccatctaacttgtctgttaagtgattttggattttatctttatatgtatttgctgtaccaacaggtttatgtccaagaagtaatagttcttctgttgatccagataagtcaacaattctctttggatttactggaattgtagcttcacctttagcatgttttacaacttttgttttcggttgttcttttgctttcgattcttctttttgagaagaacagccaacgatagaaagaacaacaagcataatagtaaataaaataaatagcttacgtttcatcctgatgtaacccctttaattagtattgataatcattatcgacttctgtatattaaggtgctttaacctttctgtcaatggaaaataacagaagtttcaagtggagaacatttgttggggcagtctcgcttttctatcattaaatatgttaaaatggaatacatgatttaagagggagagatcgtattttgtttgaatatgttacaggttacgtggagtatgtagggccggaatatgtcgtaattgatcataatggaattggttatcaaattttcacaccaaatccgtatgtatttcaaagaagtaagcaagaaatccgtgtctatacatatcattatgtgagagaagatattatggcactttacggttttaaaacacgtgaagagcgtttattatttacaaagttgttaggcgtgtctggcattgggccaaaaggcgctcttgcaattttagcttctggtcaaacaggacaggtcgttcaagcgattgagcatgaagatgagaagtttttagtgaaattcccaggcgtcggaaagaaaacagcacgccaaatgattttagatttaaaaggaaaactagcagatgtcgtaccagatgcatttgttgatttattctcagacacagaacgttttgatgagaataaaggttcatcagctgagcttgatgaggcactggaagctctgcgcgcacttggatacgcagaacgcgaagtttctcgtgttgtaccagagttattaaaagaagcattaacgacggatcagtatattaaaaaggcacttagtcttttactaaatggtaagaggtgagtataatggacgaacgtctcctttcaggggaatctgcatatgaagatgcggatttagaatattcattacggccacagacgctccgtcagtatattggccaagataaagcgaaacataatttagaagtatttattgaagcggcgaaaatgcgtgaagaaacgttagatcacgtgcttttatatggaccaccaggtcttggtaaaacgacgcttgcgaatattattgccaatgagatgggcgttaatgttagaacaacttcaggtcccgcaattgaaagaccaggagatttagctgctgtattaacagcgcttcagccaggtgatgtattatttattgatgaaattcatcgtttgcatagatcaattgaagaagtattgtatcctgcgatggaagacttttgccttgatattgtaattggaaaagggccttcagcacgttctgtacgcctagatttaccgccatttacattagttggagcaacgacacgtgctggagcattatcggcaccgcttcgtgaccgcttcggtgtactttcaaggttagagtactacacagtagatcagctttctgcgattgttgaacgtacagcagaagtatttgaagttgaaatcgattcgttagctgcattagaaattgcaagacgtgctcgtggtacacctcgtattgcgaatcgtcttttaagacgtgtacgtgatttcgcacaagttcgtggtaatggaacggttacgatggaaattacacaaatggcattagagctactgcaagtagataaattaggtctagatcatattgatcataaattactgcttggtattattgagaaattccgtggcggtccagttggattagaaacggtttcagcaacaattggagaagaatctcatacgattgaagatgtgtatgagccgtatttattacaaattggctttttacaacgaacgccgaggggccgaattgtaacgccgcttgcgtatgaacatttcgaaatggagataccaaaagtatgacggagatgccaaagctgcttattacagccgggatcttactcatcgttgttggattagcttggaagttcattggaaggcttccaggcgatatttttgtgaaaaaaggaaacgttaccttttattttcctatcattacatgtattgtgttaagtattgtattatcttttattatgtatataataaatcgatttaaataagaaataggtggatatagctatggatataaatctgtttgattttcatttaccagaagaacttattgcacaagtcccgttagaagagcgtgaaacatcaagattaatggtgttagaccgtgaaacaggtgatattgagcataaacattttacggacattctttcttacttacatgagggggattgcttagttttaaatgaaacgaaagttatgcctgctcgtttgcacggtgtgaaagaagatacaggcgcgcacattgaagtacttcttttaaaacaagaagaaggtgataagtgggaaacgcttgtaaagccagcgaaacgtgtaaaagaaggaactgttatctcttttggcgaagggaaattaaaagcaacttgcacaggaactgcagatcaaggtggacgtcagcttgaattttcatatgacggcatcttctatgaaattttagatgaacttggggaaatgccacttcctccatatattaaagagacgctagaagatcgcgatcgctatcaaacagtatatgcgaaagaaatcggttcagcagcagcgccgactgcgggacttcactttacagaagagttacttgagaagttaaagcaaaaaggcgttcagttagcattcattacacttcacgtaggacttggaacatttagaccagtttctgcagacacgattgaagaacaccatatgcacgcagaatattatcatatgtctgaagagacagcggcattattaaatcgtgtgaaagagaatggtggacgtattattactgtaggtacgacatcaactcgtacgttagaaacaattgcaacagatcatgaaggtaagctttgcgccgcttctggatggacagatattttcatgtatccgggatatgaatttaaagcaattgatggtttaattacaaacttccatttaccgaaatcaacattaattatgcttgtaagtgcatttgcaaatagagataatgtacttcatgcttataatgaagcagtaaaagaaaaatatcgtttctttagcttcggtgatgcaatgtttgttgcatctcacgctaaaatgagaaacaaataaaaggagtaagttatgacagcaattcgttatgaatttattaagacatgtaaacaaacgggtgcccgtttaggtcgtgtgcatacgccgcacggttcatttgatacaccaacatttatgccagttggtacacttgcaacagttaagacaatgtcaccagaagaattaaaagcaatggattctggcattattttaagtaatacgtatcatttatggctacgtccaggtcatgaaattattcgtgaagcaggcggcttgcataaatttatgaactgggatcgtgcaatcttaacagactctggtggtttccaagtattcagtttaagtgacttccgtcgtattgaagaggaaggcgttcacttccgcaatcacttaaatggagataaattattcttatcaccagaaaaagcgatggaaatccaaaatgcattaggttcagatattatgatggcatttgatgagtgtccaccattcccagctacttttgaatatatgaagaaatctgtagagcgtacgagccgctgggcagaacgttgcttaaaagcgcatgaacgtccgcaagatcaaggtttattcggtattgtacaggggggagagtacgaagagcttcgtcgtcaaagtgcgaaagatcttgtttcaatggacttccctggttacgctgtaggtggtttatctgtaggcgaaccgaaagatattatgaaccgtgtacttgagtttacaacaccacttcttccagataataagcctcgttacttaatgggtgtaggttctcctgactcgttaatcgatggcgcaattcgtggtattgatatgtttgactgcgtacttccaactcgtatcgctcgaaatggtacatgtatgacaagtgaaggtcgcctcgttgtaaaaaatgcgaaattcgcaagagacttcggtccgcttgatccaaactgtgattgctacacatgtaaaaactactctcgtgcgtacattcgtcacttaatgaaatgtgatgaaacgttcggaattcgtttaacgtcttatcacaaccttcattttctgttaaacttaatggagcaggtgagacaagctattcgtgaagaccgtcttggcgatttccgcgaagagttctttgaacagtatggctttaataaaccgaatgctaaaaacttctaatacataatttaaaaggaggaacaaaagatgaatgcaggtatgatgaatatcgttatgatcgttgcgatgtttgcgattttctatttcttattaattcgcccgcaacaaaaacgtcaaaaagcagttgctcaaatgcaaagtgagttagcaaaaggtgatgctatcgtaacaatcggtggtttacacggtacaatcgaatcagtagatgagacgaaaattgttattaaatctggtggttcacacttaacgttcgatcgcaatgcgattcgtgaagttgtgaaaaactaatttggaaggccctgcatgaaatatgcagggccttttttagttactttgctttgacatatttacaccgaaaataccaccgagtgtactcgcccccattaatgctaattgataaagtaattgtgagttcgataaagtttgagaaaagcctaaatagttaactagaaaaacgagtatagtgaacgtgagacctgttgtgagacctactagccaaccttttccttgagcctttttgccggcagtaaatccagacataagcatagataaaagagcgagtataaaaatagtaacggttaatgtcccttcgtttatattcgtaaactttaataaaagagccataatcatactagtaatagatgcgagaattagtagtgtaacaataccgaagccaattgcagttgataattttttcgttccatccatttatgcattccccctttttaatacaagcatattttccttttgtctaagttagactagtttcttttttataggggagtctatacgtaaaaaaggagatgtagaaatggaatggatatcaataattggacggacaatgcttttgtatatcatcatcttaattatttttcgtcttatgggtaaacgtgagataggagagctaagtgtattagatttagtcgtatttattatgcttggagaaatggctgtagtggcaattgaaaataccgataaatcactttggcatcaattagttccgatgacttttcttatgtgcatccaaattattttgtcagtcatttccctaaagtatcaacgctttcggcatttaatagaaggtgagccggctattcttgtaaacgcgggaaagattgatgaaaagaagatgagaaagcaacgttataatatagatgatttaatgatgcaattaagggaacaaggagttggagatattcgggatgtagaatatgctattttggaaccgtctgggaagttatctgtctttcaaaaacaaaaaaataaacaagatacattgcagtttacgcttcctcttattattgatggagaaattcaatctagtcatttacaaatgattgaacatacagatgcatggcttattgagaaattaaaaaacttaggttataacgatgtaacacaaattttatactgtagttttcaaaacggaaaattttttgttgatgtaaaagaaaattagagacttattctttgaaagagtaagaatgattagtgtaactaataatcagtggagattaccccactgattaaagtttcaccttatttcaaaaatgaaagtttacgaatgatagggagacgacttaactcttcttttcgaatgagtttgaaagtgaagagaagtacgatataaacaattgttgttaaagtgatttcccataatgtttgtatgccaagggcatgagagaaaataatatatttatgaagataaaaaccgaaggcgcctgcgataccgatggcaagtccgccgaaaatatagtcttttgcgtaaatggtaaatgtaatcttttttaaaacagtagcgtagtgaagaaatgttactgttacaatatttgctgcaatagcgagagcaacccccatcatttgaaattctggcctggatgctagtacaaaaataacgattaatttcacgatggctccaataaatgtattcatcattgcagctcttgctaagtttaaagcttgcaaaacagaggtaagtggactttggaaataatgaaataaaaagcaaggcgcaagaagttgaatgaatgctgttgcgctgtctgatccatacataagagttaaaacaggagaagcgaatacgtataatataacgacagaccatccgccggtaattaatgaaattcgaagtgcttgttgtaaacggtgctccactaatttatgttgtctttttgccattgcttcactaatagaagggacgagcgctgtagagagagcgtatgtaataaaggcgggtagtgatagaagcgggaatgcataaccgtttaatataccgtattgctgggttgcaacagaagcagcgacaccagcgattgctaagctttgcataacgacaataggttcaaaaaaatatgaaacggagccgattaaacgacttcctgtagttggaagggcaatatccatcagagaataaaatgtccctttgctttcctttacagtagtgaaaaatccagagcgtattgataaatgtttttctcgctgaaataacgtgagtaaaaataataacgatgcaacttcaccgagaacagctgataacatagcgccggctgcagcgtattctatgccgtaaggtaaaaataattgaatgcatatagcgataatggtaatgcggacgacttgttctagaacttgcgcataagcgctaggtttcatgttttgtttcccttgaaaataaccacgcaaaacagaagaaacagcaataacaggaacaacgggcaaaatggccattaatggatagtacgttctttcgtcggttaataatgtttttgctaaaataggtgtgaggaacataattccgattgttaaaatgatactaataacggatgtaacagctagtgatacggttaatatttttttaactctttgtttatcgttcacagcttccgcttctgctacaaattttgcgattgcgacaggaagaccaatttgtgtcaatgtaattgctaaaatgaatgtaggaacggccatcatataaagaccaacgccttcttctcccaaaatacgtgccattactatgcggttgataaagccgagtatttttgtaataaagccggctatcattaaaataaatgcgccttttaaaaagctttgtctcgtcatgttcttctcctaccttctcaaaatcaatggaatgatttacaataatttatatgcacgtacgagacaagaatgacaagcatttaagagagtgaaatatgatagtgctcttgaaagtagttattgctgtccattagagcgggaataaaagcgacttttcgtgcgaaataagaaggagatgttatagatgttagatagagaggctttggtagaatcataccgcggacagttacaagtcgttttagaaagtaaagtagaagagtttcaaatgttcggctacgacagagtgacagatgatgacatttggaagtttcttaaagtgaaaaagtggaagaagatagacagcgatgttagattgtatgaattagttaatgacgtattaacagtaagtgctaatgaatatatgacatatttaactgttgaagcatatcaagcgccactttggtcatttgatgaatatgaaaataaataaccgactgcaattggtttgttcttccttttgcagtataatgataggtattgataatcaggaaataattatgtctaagatcatatataaaggaggtagtgaagagagaaaacaaataatgaaagtgcaggtatcgtgaaaacgtaccggcacagctagtgatgagctagcaaaattatagaaaggaagtctactaactagacgtatacacacgtgtaaaagtgaatcgtaagagatttatttaaagtgttagtagcggaaagagggtacatatggcaaagcgtggtacgagaattgccgcctttttcctcatcgttttattaatcggtggagtaattggtgcggcaggaaaagacatagcaaaaggaattagtctaggactagaccttcgcggtggttttgaaattctgtatgaagtaaaaccagccaaaaaaggggacaaaatcgatcgagacgtacttgtaagtacagtaggtgctcttgagaatcgtgtcaatgttctcggtgtaagtgagccgaacattcaaatcgaagggcaagatcgaattcgtgtacagcttgctggtgtacaagatcagcaaaaagcacgtgaaatgttatcaacacaagcgaaattaacattccgtgatgtagatgataatcttcttatggacggaacggatttaaaaggcggcggagcgaagcaaacatttgatgagcaaggccgtgcgagcgtaggtcttacactaaagagcgctgaaaaattccgtgaagtaactgaaaaaatttcaaaaatgccaccaccaacgaatttaatggtaatttggcttgattttgaagaaggaaaagattcgtacaaagcagaatctgcaaaaccgaatccgaagttcttatcagcagcaacagtaaaccaagtatttaaccaagctgaagtatctatcgtaggtggaaacttcacagttgaaagtgcgaaacaactttcatctttattaaatgcaggtgcacttcctgttgatttaaaagaaatgtattcaacatctgttggagcgaagtttggtcaacaagcgttagagcaaacgattttcgctagtgcgattggtatcgctcttattttcttatttatgcttgtattctaccgtttaccaggacttgtagcggttattatgttaggtttatacgttttcgttacattacttgtctttaactggatgcatgcagttcttacgttgccaggtattgcggcgttagtgctcggagtaggtatcgcagttgatgcgaatattattacgtacgagagactgaaagaagagttgaaaattggtaagtccatgatgtcggcattccgcgctggtaaccatcgttcattagcaacaattctagatgcaaacgttacaactcttgcggcagctggtgtgttattcgtttatggtaatagctctgtaaaaggattcgcaacaagtttaatcgtaagtattttagttggttttattacgaacgtattcggtactcgtttcttactaggtttacttgtaaagagccgttactttgataaaaaaccaggatattttggtgtgaaacaaaaggatattattccattaacaaaaggtgtagtacatccgccaacgagatttgatcgtattaacttcgtaaatatcggtcataaattccttatcttctcgattgtagttgtaattgcgggtgcaattatcttaccaattttcaaattgaatcttggtattgactttgcaagtggtacacgtattgacttgcaatcaaaacaagccgttacggtgtctgatgttcataaagattttaaagaactgaacattgatgtgaaggaagaaaatattgtaccgactggagatgacaataaaggtttcgcagttcgtacattaggtgttttatcaaaagatgaaattgcgaaaacaaaaacattcttccacgataaatatggtacagatccaaacataagtacagtttcaccgacaatcggtaaagaaattgcacgaaatgcatttatcgctgtactgattgcttctgcggttatcattttatacgtaagtattcgattccgatttacgtatgcgttatctgcagtacttgcattattacatgacgctttcgttatggttgttatgtttagtattttccaactagaggtagacttaacgtttatcgctgcagtactaacaatcatcggttattctattaatgactcgattgttacatttgatagaaaccgtgaattatacaaacagaaaaaacgagtgcgcgatataaaagatctagaagaaatcgtaaatgcaagtattcgccaaacgcttggtcgctcgattaataccgtattaacagtgttattcccagtaattgcactgcttatcttcggtagtgagtcactacgtaacttctcgtttgcgttacttgttggattaattgtaggtacgtactcttctgttttcgttgcctctcaaatttggttaatgcttgaaaaccgtcgtttgaaaaagggaaaaaacaagaagaaggttgagaaagtagaatctgaaccgcaagtatagaaaagatgatgtctctttatgaggcatctcttttttcgtttgtggatacaataagatagcaactttttaacagaaagaagatggaagaaagtggtggtgttatcgctgtttttgttaaaataaaaagataggttaagaaaagaagggattttaattatggaaaaagatgaacgttttaaacaggccgagtttggtgccattgtcgggatcgttggtaatattatattagcgattgtaaaggcggtaattggttatattgggaacagtaaagcgctattagcggatgccgtgcattctgcatcagatgtaattggttcgctagctgtactttttggattgcgagcggcaaagcagccacctgatgaagatcatccgtatggtcatggtaaagcggaatcgatttcagcgattattgttgcggtattattatttattgtgggacttgaaatcgcgatttcatctataaaagctttttcgcaagaactagaaccgccgaaaggaattacgatatttgctgttgttctttcaatcgtcgtgaaagaaggaatgtttcaatataaattccgattagggaaaagggtaaatagtgatgcaattattgcaaatgcatatgagcaccgttcggatgtgttttcttcaattgcagctttaatcggtatttgtgcagctatactcggtggtaagcttggtatagactggcttgtatatgctgatccgattgcaggattagttgtttcgcttcttgttgtaaaaatggcatggagcattggagcggaagcaattcatgcaacgcttgaccatgttcttcatgaggaggatgttattccgcttagagaggccgttcttcaagtagatggtgtgaaaaaaattggttctttatatgcacgggagcatggtcattatgttattgtcgatattaaagtgtctgtagatccatacattaccgtagaagaaggacaccgtattggaaaacatgtgaaagaaatacttatgaaacaagataatgtacaaaatgtattcgtacatataaatccgtattctccaaattaaacatcattaacattttagtatatagatattgcatcgtagtttgcattatattgtcaccccttaatctgtcttgtataatgaacaggttaaggggtgatttcgtgttacaaccgaagacgcgttggaaagaaaaagaatataatgacgagcgagtgagtgaattagcaagtaaattacagttatcgccacttgtcgtttcattattcctcggtagaggactagatacagaagataagattttagattttttaaatacagaaaatcaagaatttcatgatccatttttattagaaggaatggatagaacggtagaacgtgtaaataaggcgattcaaaatggagagcaaatattaatatttggtgattacgatgcggacggagtaagtagtacgacggttttatatcttgctcttcaagaattaggtgcagaagtagaattttacattccaaatcgttttacagaagggtatggaccgaacgaagaagcatttcgttgggcgcatagtgcaggtttctcactgattattactgtcgacactggcatcgcagcagtacatgaagcgaatgtagcgaaagagcttggaatagatctaattattacagatcaccatgagccaccgccagaattgccagaagcgcttgcgattatacatccgaaattagaaggtggcgtatatccgtttcactatttagctggtgtaggtgttgcgtttaaagttgcgcatgcactattaggccgtgtaccagaacatttattagagattgcagtaatcggtacagtagccgatttagtatcacttcatggtgaaaataggttgctagtgaaacgcggtttaaaacatatgcgtatgacgagaaatattggtttgaaggcattgtttaaagttgctaacgtttcgcaaagtgaaattacagaagagagtattggcttctcaattgcacctcgtattaatgcggttgggcgtttagaagatgctgcgccggctgtacaccttttattatcagatgatccagaggaagcgaaagagttggccgaagaaattgatgagctgaacaaactgcgaaaagatattgtaaagcaaattacagaagaagctatcgctgaagttgaaaataaattcccgccagaagaaaacaaagtattagtacttgcaaaagaaggctggaacccaggggtaattggaattgttgcttctaaattagttgaacgtttttatcgtccgacgattgtattaagcatcgatcctataaaagaaacagcaaaaggctcagcacgtagtattgcaggatttgatttgtttgcaaacttatcagattgtagagagttattgccacacttcggagggcatccgatggcagcgggaatgacgctacatatgaatgatgtagatgaattacgtcgccgattaaatgaacaagcagatgcgattttaacagaagaagattttattccaattacagcagttgatgttttttgcaaagtagaggatgtaacgctagcggcaattgaagatatgcaaaaactagccccgtttggtattggaaatccgaaaccacgtattgcagtaaaagatgcagagttagaaagcattcgcgcaatcggatcagatggttctcatttaaaaatggctcttcgtgatggacaagcaacactggatacaattggatttggttttggtgcatatgctaaagaaatctctccagttgcaaaagtatctgtaataggagaagcatccatcaatgaatggaataattttaagaagccacaactaatggtacaagatattgctgtagaggcgtggcaattatttgattggcgtagtatgcgtaatgcagaagcaaatttagcagaacttccgaaagaaaaaataacaatggtgtatttttctgaagaggtattgaataaattttctttagagagctataaagaaaagctcatgcatgcttcagaagtaacgcatttagatgatcaatatatcgtgttacttgatttaccaaaaggaaccgatgaattacgtgagttatttaaggcaggattcccagcgcgaatttatacgctattttatcaagagaataaccacttatttagtacagttcctacgagagaacactttaaatggtattattctttcttaaaccaaaaaacaccattttctttaagacaatatggagaacaactatgtcgtcataaaggttggtcaaaagatacagtaaattttatgacacaggtgttttttgagttagaatttgttacaataaaagatggcgtcatttttatggcagacaaaaaacaaaagcgtgatttaattgaatcgaacacatatcgtgagaaaatgaaccacttacaattagaaaaagaattggtttatagcacatatcagcaactatatacatggtttgaaacgattcgtaatcataaagaagtagaacagttagggtaaaggatttgtatttacaaaccttttagatctgaggaggattcagaaatatggatttcaagcaacatatcgcaattgtaccggattatccgaaagaaggtattgtgtttaaagacattacacctttaatgaatgacggtaaagcatacaaagcagcaacagatgcaatcgttgaatacgcaaaagaaagagatatcgatgttgtagtaggaccagaagctcgtggtttcattatcggttgcccagtttcttatgcgttagaagtaggatttgcgccagttcgtaaattaggaaaattaccacgtgaagtaattacagttgactacggtaaagaatatggtaaagatgttttaacaatccataaagatgcaattaagccaggtcaacgcgtattaattacagatgacctattagctacaggtggaactatcgaagcgacaattaagctagttgaagaacttggcggagttgtagcagggattgcattcttagtagagcttacttacttagatggtcgtaaaatgttagatggttacgatgtattagtattagaaaaatactaatcactatataggtaaaactacggtgataaaaagtacccgtgaatctcttggagaggagcgggtacttttgtataattgaacaaaaaatcatggtgaaatgtcagtaaaatcttttccttttcacaattcacaatcattgggttataatgatagaatataatttattctattaaataaagataaagtcaattttcaataaaaggtgattcgatggcaaatgagcaggtactaacagctgaacaggtactcgagaaagcaagtcaatatttagtggatgaagatattgagctagtagcacgtgcctatgaatatgcacgcgatgcgcatagcgaacaatacagaaaatcgggtgaaccgtatattattcatccaattcaagttgcaggtattttagttgatttacacatggatccagctacggtatcagcaggtttcttacatgatgtagtggaagatacagagattacgttagaagatattgaacgggaatttaacaaagaaattgctatgcttgttgatggtgttacgaagcttgggaagatcaaatataaatctcacgaacaacaacaagcagaaaaccatcgcaaaatgtttattgcaatggctcaagatattcgagttattttaattaaactagctgatcgtcttcataacatgcgtacattgaaacatttgcctcaagagaagcagcgtcgcatagcgaatgaaacgctagaaatctttgcacctttagcacatagactcggaattagtactattaaatgggagctagaggatacgtcacttcgctatttaaatccacaacaatattatcgtattgtaaatttaatgaagcgtaaacgtgcagaacgtgaagaatacttagacgaagtaatgactggtattcgtgagaaattaaaagaagttgcaattcaacctgagatctctggaagaccgaaacatatttacagtatttatcgtaaaatggcactgcaaaataaacagttcaatgaaatttacgatttattagctgtacgtgtcgttgtaaatagtattaaagattgttatgcagtgcttggaattattcatacgtgctggaagccgatgccaggtcgttttaaagattatattgcaatgccaaaagcaaatctatatcaatctcttcatacgactgtaattggaccgaaaggtgatccacttgaagtgcaaattcgtacgaaagaaatgcacgaaattgcagaattcgggatcgcggcacactgggcatacaaagaaggaaaaacagcagaaacaacaggtacattagagaagaaactcacgtggttccgtcaaatattagaatggcaaaatgaagcttctaatgcagaagaatttatggagtcattaaaaattgatttattctctgacatggtattcgtctttacaccgaaaggcgatgtaatggaattaccacttggatcggttccaattgatttcgcgtatcgtgtccattcggaaattgggaataaaacaattggtgcaaaagtaaacgggaaaatggtgacgctggattataaattaaaaaccggcgatatcattgaaattttaacgtcgaaacattcatatggcccaagtcaagattgggtaaaacttgctcaaacatctcatgcgaaaaataaaattcgtcaattctttaagaaacaacgtagagacgaaaatattgaaaaaggccgtgaacttgttgaaaaggaagtacgtggtctagagtatgagatgaaagaagtattagcgcctgataacttaaaacgcgtcgcggagaaatttaactttgcaaatgaagaagatatgtttgcagcagttggatatagcggaattacagcttcgcaaattgttacgcgactaacggacaagttccgcaagcaacgcgaagaagaagaaattgttgaagtcaaagaagttcgtaaaccgatgaaaattcgaaaatgggattctggtgtaaaggtaagcggtgctgataatttattaatccgtttatcgaaatgctgtaacccagttccgggtgatgatatcgttgggtatattacgaaaggccgaggtgtatcgattcatcgccgtgattgtgtaaatgttcatacagaagaagcgatagaacgtttattagaagttgagtgggaaggtagccctgaaaaagaaatagagtataacgttgatattgaaatttcaggttacgatcgccgcggtttattaaatgaagtactgcaagctgttacagagacgaaaacatacatttcagctgtttctggtagaagtgaccgtaataagatggcaacaattaatatgtcaatctcgattcgtaacttacaacacttgaaaaaagtagtagaacgcattaaacgcgttccagaaatttatgcagtacgacgcatgatgcattaatagggagtgtagaaagatgagagttgttttacaacgatcaaagaaagcgtctgtcacagtagacggtgagatcgtaggacaaattccgttcggtttaacattactagttggcattacgcacgaagatacagaaaaagatgcaacttacattgcggaaaaaattgcaaacttacgtatttttgaagatgagagcggaaagatgaatcattctgtacttgatgtagaaggacaagttctatctatttcgcaattcacattatacggagattgccgcaagggaagacgtccaaactttatggatgctgcgaaacctgattatgcagagcgtttatacgatttctttaatgaagaagttcgtaaacaaggattacatgtggaaacagggaagttcggagcaatgatggatgtttctttaatcaatgatggtccggtgaccttaattgtagaaagtaaatagtgttgataaaaaagagagggttatataatcctctcttttttatacattgttgtatgttttgttcatttatttggaattaatagcagtttcggttatgtataactctcccatcaatatggaacaataaaaagtaaaacatccatattgaatgtgagggatatacgtatgcgtatgaatgaaaaagggcattctgttacaaatggtgcaaatcaactatttaacgtgaattttcatgattttatttcaaaagagcaaaacaatacttcaatggagcttgcttccgagtttgggatttctcttcaagatgtaaagcgtttaaagaagcagattgaacgttcttagagcacttgacaatcctacttaacaaacgtatagtaattttatatttacatatgaatataaccgttgatagagaagagtaaatgagacacacatggaaagagaaggaatgtcttaggctgaaaacatttctgcatgatgactgattgaatgacactctagaggtttcaacttgaacggcatatacgcttagtagggatgaacgcacatttaagcgttattaaaaaagtggaagcatacgtgcttcaattagggtggcaccacgggtataatactctcgtccctactgtttaaacagtagaggcgggagtttttttatttttattaagattaaaacaatttgaggaggaactgaatatgtctattcaaatcccacgcggaacgcaagatattcttccaggcactgttgagttatggcagtatatcgaagggcaagcacgcgaaatttgccgtcgttacaattataaagaaattcgtacaccaatttttgagcacactgagctatttttacgcggtgttggtgatacgacagatatcgtacaaaaagaaatgtactcattccaagatcgtggagagcgcagcttaacattacgtccagaaggtactgcacctgttgtacgttcttatgttgaaaataaaatgtttggtgatgcaacacaaccaacgaaattatactatatcggtcaaatgttccgttatgaaagaccacaagcaggtcgctatcgtcaattcgtacaattcggtatcgaagcaatcggcagtaatgaccctgcaattgatgcagaagtaattgcacttgctgttgaattttaccgcggcatgggcttaaaaaatattaaagttgtattaaacagtttaggtgacgcagcgagccgtcaagcacaccgtgatgcattaatcgcacactttgagccacgtatcggcgaattctgttctgactgtcaatctcgcttagaaaagaatccacttcgaattttagactgtaagaaggaccgtaaccatgaattaatgggaacagcaccatctattacagaatacttaaacgaagattcagcaatatactacgacaaagttcaagaactattaacgatgatgaatgttccgtttgaaaaagatccgaacttagtgcgtggtttagactactaccaacacactgtttttgaaattatgagtgaggcagaaggtttcggtgcgatcactacattaagcggtggtggccgttataacggacttgtacaagaaatcggtggaccagaaatgccaggtatcggttttgcaatgagtattgaacgtttaattatggcgctaaaagctgaaaacattgaattaccacttgaacatagcattgattgttacgttgtggcgcttggcgaaaaagcgaaagaccatgctgcaaaagttgcgttcgatcttcgtaaagctggattgtcagttgaaaaagattatttagatcgcaaaatgaaagcacaatttaaatcagcagatcgtctaaaggcgaaatttgtagctgtattaggagaagatgagctagataaaggcatcattaacttaaaagatatggcaacaggtgaacaagaagaagtagcgttagatgtatttgcttcatacgtagcagagaaattaatatagggggaacttacagtggctgaaagaacacatgcatgtggaaaagtaacagtagaagctgttggacaaacagttcaattaaaaggttgggtacaaaaacgccgtgacttaggtggattaatctttatcgacttacgtgaccgtacaggtatcgtgcaagttgtatttaacccagaaacatcaaaagaagcgttagaagtagcagaaacaattcgtagcgaatacgtattacacgtagaaggtacagttgttgaacgtggtgaaggcgcaattaatgacaatatggcaactggtcgtattgaagtacaagcaacgaaagtaaatgtactaaatgcagcgaaaacaacgccaatcatcattgctgatgatacagatgcatcagaagatgtgcgtttaaaatatcgttatttagacttacgtcgtccagtaatgtttaacacattcaaaatgcgtcatgacgtaacgaaaacaattcgtaacttcttagacacagaagagttcttagaagtagaaacaccaattttaacgaaaagcacgccagaaggagctcgtgactatttagtgccaagtcgtgtacatgatggtgaattctatgcattaccacagtcaccacagttatttaaacagcttcttatggtcggcggatttgagcgttactatcaagtagcacgttgtttccgtgatgaagatttacgtgcggatcgtcaaccggaattcacgcaaatcgatatcgaagcttcattcttaacacaagatgaaattttagatatgatggagcgtatgatgacgaaagttatgaaggatgcaaaaggtgtagaagttagtgcaccattccctcgtatgaaatatgctgatgcaatggctcgctacggttctgataagccagatacacgctttgaaatggaactaacagacttatctgagtttgcagcaggttgtggctttaaagtgtttacaagtgctgtagaaagcggcggacaagtaaaagcaatcaatgcaaaaggtgctgcaagtaaatattctcgtaaagacatcgatgcattaactgaattcgtgaaagtatacggtgcaaaaggtttagcttggcttaaagttgaagaagacggtttaaaaggaccgattgcaaaattcttcggtgaagaagatgcaaatgtgttaatgagcacattagaggctactgctggcgacttattactattcgtagcagataagaagagcgttgttgcagatagcttaggcgcacttcgtttacgtctaggtaaagagcttgagttaattgatgaaagtaaatttaacttcctatgggtaactgattggccacttcttgagtacgatgaagatgcagatcgttacttcgcagctcaccacccattcacaatgccattccgtgaagacgttgagttactagaaacagcaccagaaaaagcacgtgcacaagcatatgaccttgtattaaacggttatgagcttggtggtggctcacttcgtatttacgagcgtgacgtacaagaaaaaatgtttaaagcacttggattctcacaagaagaagcgcaagagcaattcggattcttattagaagcattcgaatacggtacaccaccacacggcggtattgcattaggtttagatcgtcttgttatgctgcttgcaggccgtacgaaccttcgtgatacaattgcattcccgaaaacagcaagcgcaagctgcttattaacagaagctccaagcccagttgcagaagcacagcttgaagagttaaacttaaaattaagcttaaaagaagagaagtaagaatagggtctagatggttatactataaccgtctagactttttttgagaggttgtttaaaaagtccggtttagataactgtcgcatctcatcgttgcttcgccagtccggtgctcgagtagtatttttctacactgcgctcctcctggcttcagcgcctcgatctgctcggttctctgaatcctcttttttaaacgtgtattgaaaggaagtttaaaaagtccggttcagataactgtcgcatctcatcgttgcttcgccagtccggtgctcgagtagtatttttctacactgcgctcctcctggcttcagcgcctcgatctgctcggttctctgaatcctcttttttaaacgtgtattgaaaggaagtttaaaaagtccggttcagataactgtcgcatctcatcgttgcttcgccagtccggtgctcgagtagtatttttctacactgcgctcctcctggcttcagcgcctcgatctgctcggttctctgaatcctcttttttaaacgtgtatttaggaagaaatgaaattctggtctatgttttcattttcgaaatatgtatttttaggaattctataactttttctatacaaatagtcggaaaaacgctagaatacatggtagaccatttttgtaataggagtgtagagctgaatgttacatcaattttcacgtaatgaattagccttcggtaaagaaggacttgaaatattaaaaaatagtacagtcggtattttaggaattggcggcgtaggttcattttcagctgaagcgttagcgcgttctggagtaggacgtctcgtattagttgataaagacgttgtagatattacaaacgtaaaccgtcaaattcacgctttagtatctactgtaggacgttcaaaagtagaattaatgaaagagcgtattgcagacattaatccggaatgtgaagtaattggactagaaatgttttatacagatgaaacatatgaggagttctttaaacacggtttagatttcgtagtggatgcatctgatacgattacgttcaaaatccatttaattaaacaatgtttacgtcgtaaaattaaaattatctcatgtatgggtgcagcaaataaaatggacccaactcgtttccgtattgcggacatttctaaaacacacacagatccgattgcgaaagtcattcgtacgaagcttcgtaaagagggtattaaaaaaggtgtaaaagttgtcttctctgacgaaaacccaatcgtaattcgtgaagaagtacgtaaagaaatcgtaccagacgaaaatgcaaaaattcgtaaagcgaaattaccgccttcatcaaatgcattcgtaccatctgtggcaggcttaattatggcaagtcacgttgtacgtgaacgtattaaaaatgtagaagtgaaacgtgtagggcaagaataaaagaaaagcatatatccattttggatatatgcttttttatatgtattaaagaaatatggatatttgcattactactagttcaaatgtaagtaaggttagtaagtaaaaatcatatttatctgatttataggcggatgtcttttttagactgttaatggtgaaaagagctaaagttaggacgagaaggccaagagttattttgaagattattaatgaaatagcaaccatccccctttaaaggtatatgtttataataatattttagtaaaaaatatctaatccgttttaggagtttccttgtatgacaaggaggaatgttattgtcaatctttgtcgttaaatcgatatcctttattgaatcgttgatatattgcaagttgtgatagatatattcgaaaaatcgttgatatattgcaagttacgatagatatattcgaaaaatcgttaatataatttcatttaccgacatgtatatatatgatttaccgaaaacaaacaaggatgtcactcagttaaaaaagtgacatccctgtttttaattctcagcagaataaataatatctaaattcccgttttgatcggttttgaaaatcggggcaatttgctcttcttgctcttcgactgaaacaagttttcgagcacgatccataattcgaacaagcatcgcgtaatcttcttcgattgcttgttgtttttttgtgagtaccgctaatttcgtttcaagttcatgattcgttttttgcagagaagtgagctgagcttgtaatacatcattttcagtttgcaactttgcgagtgaagggttattatgctccaagttttgcaaaaatgagatgacattttgcatcgtaagttcttgtttacttggcgtaatatcttcagaaaactcagcatcgattacgagttgtttcgttttcgtgaactgatttttttctattttagcttcagagcgctttaattctttacgttgtttcttcgcaagctgcacagcatcttcgtaattcggtcttacttcagcattccatctaaagccgcaagctgctgaagtccggttcaacgtatcgccgacttcatcaaatgcttttatttgtgtacttccgctgcgaatatgtcgtaaaacagtttctgctaaaaggagatcatcttcttttgtccatgcatcttgacgtgttttcataagcgaagcctccataatggtgacgttttcgtttatgttaccctttatttttcgttttattcgaagtttgtaatctttcataaacagtagaaagtgcttgctcaaatttccctgtcgttttcggtttataatattgcttgttttttattttatcaggtaagtattgttgccttacccagccgtttggatggtcgtgtggatataaatatccaatgcctcttccaagtgattctgcgcctttgtaatgactatcttttaaatggcttggaatgtcacctgtttgaccgttgcgtaaatcgtgtaatgcagcatcaagtgctttataagctgaatttgattttggtgataagcatagctcgataacggcatttgcaagtgggatgcgtgcttctgggaatccaactcgttcagctgattcaattgcagctagtgtacgtggtccagcttgtgggctagcaagtccaatatcttcataagccataataagaaggcgtctgccaatactttgtaaatcacctgcttcaataaggcgtgctaaataatggagcgctgcatttacatcacttccgcgcactgatttttgaaatgctgataatacgtcataatgagcatcgccgcctttgtcgtgaacgaagctcttcttttgtaagcattcttctgcaatctcgagtgtgatttcagccgcttgatcgtctgtagtaaagctagataatacagcaagctcaagtgcgttataagcggaacgcatatcaccaccagaggcgtttgcaaagtgatgtagtgcttcatctgttaccgttacagcatattctccaaggcctttttctttatcttctaaagctctttttaacccaattaaaatatcatcttctgttagtgcgtgtaattcgaaaatttgacacctgcttcgaatagcggagtttattgcatggaatggattacttgtcgttgcaccaattaaagtaagaagtccgctttctaagtgaggtaatagaaagtcttgctttgctttatctagacggtgaacttcatctaaaattaaaacgaggtgtcgatgcatcttcgcttcttgtacgacaacttccatatcttttttattgtgagtaacagcattcaatagacgaaacggggtaccggtacttccagcaattgcactggcaatggatgtttttcctgtacctggaggaccgtataaaatcatagattgaaaatgattggcttggaccattcgccataaaatctttccttcaccaactaaatgttgttgcccaataatttcttgaatatttgtagggcgcattcgatgtgcgagtggttgtttcatttggaccgtctcccttaatatataatctcgttctatcgtatcatttttttctacgaaatttgaaataggatgctgttttatgggaaaaataaatgataatattttcatttttctttcaattgtaataattcccgagtttttcaatgcgattttatgttatcattttgatacacaagttgaaatttcttataatactatattatgctataatttcataggattttaaattgtgttctttttataaataagatataaccaatagaagtgaaaatttgaaaagaggtgcaaaatagatgaaaatttcaacgaaaggccgctatggcttaacaattatgattgatcttgcaaaaaagtttggtgaaggtccgatttcattaaaatcaattgcgcaggcacatgacttatcggaacattacttagagcaattaatttcaccacttcgtaacgcgcgtctagtaaagagtacgcggggagcatatgggggatatgtactatcagatcagccggctaacattacagctggagatgtaatccgtgtattagagggtccgattagtgttgtagaaatgatagaagaagaagaaccagcacaacgccaattatggatgcgtgttcgtgatgcggtgcaagaagtgttagatagtacaacgttagaagatttagtacgttatgaggaagaaaatcacgggggctatatgttttacatttaattccttgtgaaacgatttggaaagaaggagatttaatggaacgcatttacttagatcatgctgcgacatctccgactcacccagaagtggtcgaaaagatgattccatatatgacagaaatattcgggaacccgtctagtattcacttttatggacgtcaaactcgtcacacagtagatgaggcgagaagagtgtgtgcacgcagcattcatgcgaatccgaatgaaattatatttacgagcggtggtacagaagctgataatttagcgcttatcggtgtagcacgtgcgaaccgtcataaaggtaaccacattataacgacgcaaattgaacatcatgcgattttgcatacgtgcgaattgttagagcgtgaagggtttgaagtgacatatttacctgtcgatgaaacagggcgcattcaagtttctgacatacaaaaggcattaacagaagagacgattcttgtatctgttatgtttgggaataatgaagtagggacgatgcaaccgattgtggaaataggaaagctgttaaaagagcatcaagcgtatttccatacagatgcggtacaagcttacggtttagtagaaattaatgtgaaagagtttggtattgatttattatcaatttcagctcataaaattaacgggccaaaaggtgtaggtttcttatacgctggtacaaatgtgaaatttgaaccgttattaataggcggagagcaagaaagaaaacgccgtgctggtacggaaaatgtgcctagtattgctgggcttcagcatgcaattcttatagctgaaaaaactcgtgagcaaaaaaatgcccaatatgaagagtttaaagatataatggtatctgtcttcaaaaatgaaggcattactttcgaggtaaacggaaacttagaacatcgcttaccgcatgtacttaatgtaagttttacaggaatgaacattgaaccgtttcttgtgaacttagacttagctggtattgcagtatcaagtggttctgcttgtacagctggttcgattgatccatcacatgtattagtagcgatgtttggaaaagactccgatcaaatacgttcatccgtacgctttagttttggacttggaaatacgaaagagcaaattgaaaaagcggcgtacgaaacagtgaaaatcgtgaagcgattaacacaaaattagtatgggaggtgacatgatgaacaaactacctcacgaaacacgcgttgtcatcggaatgtccggtggcgtcgattcatctgtagcagcacttttattaaaagagcaaggttatgatgtaatcggaatttttatgaaaaactgggatgatacagatgagaatggtgtctgcacagcaacagaagattacaatgatgtaattgaagtgtgtaaccaaattggtattccgtattatgcagtaaactttgaaaaacaatactgggataaagtatttacgtacttcttagatgagtaccgagctggtcgcacaccaaacccagatgtaatgtgtaataaagaaattaaatttaaagcatttttagagcatgcaattgcgcttggtgcggattatgtggcaacaggccattatgcacgcgttgcttatatggacggcgaatataaaatgcttcgcggtgttgatgacaataaagatcaaacatatttcttaaatcaattaagccaagagcaattatcaaaaacaatgttcccgttaggtgaattaaagaaaccgcaaattcgtgaaatggcgaaagaagctggcttagcgacagcggcgaaaaaagatagtacaggtatttgcttcattggtgagcgtaactttaaagatttcttaagtaactacttaccggcacaaccaggtgtaatgcaaacattatctggtgaagtgaaagggaagcatgacggtttaatgtattatacaattggacaacgtcatggccttggaattggtggtaatggtgacccatggtttgctgttgggaaaaatctaaaagaaaacattttatatgttgatcaaggattccataacgaacttctatatggtgatgaagttattgctacgaatgtaggatgggtaagtaacaaagaaaaagaaacagaatttaagtgcacggcgaaattccgttatcgtcaagaagacaataaagtaacggttcaaatcgttgatgaaaatacagttcgtattctttgtgatgagccaattcgtgcaattacaccaggacaagcagtcgttttctatgatggagatgagtgcttaggcggtgctacaattgatgaagtataccgtagtggtaagaaattggattatttaggataaatgagaagcctctgccgattagcggttagaggtttcttttacataaagcgaattttcgttcgcttggaaaatacattctttgttataatttgttgtagaggtgaaggacatgtcaaacaaacttgaaacaggtattcaatatatgcaagaaggaaactgggaagaagcagctaaaaattttacagaagcaatcgaagaaaatccgaaagatgcgcttgggtacattaattttgcaaatttattagacgtattaggtgatagcgagcgagcgattttattttataaacgtgcactagagttagatgataaatctgcagcagcctattatggtttaggaaatgtatattatggccaagagcaatttactgaagcgaaagctgtatttgaacaagcaatgcaagctggattacaatcagctgatgtaacatttatgttaggtatcacacatgtacagcttggaaatgatcgtcttgcactaccattcttacaaagagcaacagaattagatgaaaacgatgtagaagctgtattccagtgcggactttgcttcgcgcgattagaacacgttcaagaggcgaaaccttattttgaaaaggtattagaaatggatgaggagcatgcagatgcgtattacaatttaggtgttgcgtacgtatttgaggaaaataatgagaaggctctcgctttatttaagaaagcaactgaaattcagccagatcactttttagcgggtaatggcgttcgtttattagagcaagaagctgaataagataaaaatatagtttaatgggtagttatccctcatctaaaaaggtgggggatgtactgctcattaaagtgaaaataccggaaaggagaggaaaaatgggaaatcaacatgcaatggatttgtttgaggaagagaaaaagtttataaaagcgcaagttcttcataccattttccacaacgaagaaaacctctattccgttgtcagtatgaaagtcattgaaacgaatgaaacgtatgacgaaaagaaagtaatgataaacggtcattttccccgcatgcatgaagatgaagtgtttacattgacaggtcattttaaggaccatccaaagtatggaaaacaatatatggttgaaacatttaaaaaagaattgccgcaaacaaaagcaggtatggtgcaatatttagcgagtgatttatttaaagggataggaaagcgtacagctgaaaaaattgtggaccatctcggagaacatgctatttctaaaattatggatgaccctgaggcattaaatggtgttgttaataaacaaaaggctcaggaaatatatgagacaattgttgaacatcaagggctagagaaagtaatgagctttttaaatggctacggttttggaacgaaactttctattaagatttaccagcaatataaagagatgacattagaagtgattcgtaataatccgtatcaacttatcgaagaagtggacgggattggttttggaagagcggatgatatagggcgtgcgttagggatatcgggtaatcatgacgaccgtgtacgcgcaggatgtttttacacattagagaatgtctcattacaacttggtcacgtttatatgaggaaagatcaacttgtaagagaaacgatgtcacttttaaacaatcaagaaggaagagtgactgaggaagatattataggttgtattgaaacgatgcaaagtgaagggaaagtcatcatagaagaagaacgagtgtatttagcaacgttattctactctgagaaaggtgttgtaaagtctattcgcaggcttatgaatcaagaagaaacaccttcatttccagaagcagaagtgttaaaaacgttaggtgaaattgaagaacaactgaacgtacaatatgcaccgtttcagcaagaagcaattcaaacggcacttcataaaccgatgatgttattgacaggtggaccaggaacagggaaaacaacagttattaaagggattgttgaaatgtatgcatcactacacgggttatcgttaaatccgaatgaatacagtgatgataatccatttccaatactattaacagctccaacaggaagagcagcgaagcggatgagtgaatcgacaggacttccagcttgcacaattcaccgtttacttggttggacgccagaaggatctttccagcgtaatgaaacggatcctgtccaaggtaagctccttattatcgatgaattttcaatggttgatatttggcttgcaaatcagctatttaagtcgttgccgacgaacattcaagttatcgttgtaggtgatgaagatcagttgccatctgtaggacctggacaagtattaaaagatttattaaatgcaggcgcagttccgacagtgaagcttactgaaatttatcgtcaagcggaaggctcatcagtgattcaacttgcccatgcgataaaaaatggaactctaccaccagatttagcacaaaatcaaaaagatcgttcatttatcggctgtacaggagctcaaattgttgaggttgtgaaaaaagtttgtgaaaatgctaaaacaaaaggctttagcgcaagagatgtacaagtattagcacctatgtaccgtgggcctgctggtattaatgtattaaacgaagcgctgcaacaagtatttaatccgaagagggaaaagagtaaagaaattgcttacggtgatgttgtgtaccgaagaggcgataaagtactgcaactcgtgaatcagccggagagccaagtgtttaatggtgatattggggaaattgtttcggtgttttatgcgaaagaaaacgttgagcaacaagatatgattatcgtttcatttgacggaattgaggtaacgtatacgaagcccgatttaaatcaaattacgcatgcatattgttgttccattcataaatcacaaggtagtgaatttccgattgttattatgccaatcgtgaaaagttacaaccgtatgttacgtcgtaatttaatttacacgggcattacaagaagtaagaagttccttattatttgcggagaggaagcagctttccaatctggtgtaaatcgccttgatgatgcaatgcgtcaaacaaccttagctagtcgcttgcaagaatcacaaggagaagtacagatggtcacagttaatggcgaggaaatggacgtggaaaacatttcaccgtatgatttcatgtaacaaggtgaaattatatagtgaaactttcaaacgcatagcgttgaaaggctccagtaaaatgtataaatgaatgcagtttggacataatggcgaatagaatctgggagactgtaaggagatgaaagccatatgtttatttgtccaaattgcaaagggaaagacattggaaaaataggtgtcaaccaattttattgctggaattgttatatcgaattatcggtttcaaaggggaaaatccatacgcatcaagttgaggaagatggttcactaagctctcttgatgatttatttgatgagaatgaaagaacgatcggataacgaaaagggggatttactttgaatctacgcaattcattaatcgcattaggtgttggagctgcagcatatcaatatgctcgtaagcaagatgtattttcaaaacgcaatatgaaaaaagcacgtaagatgattaagtcttacttataatcatttcgataaagtgaaaaactcccttgtagacaagggagtttttttatgcacccatatgtaaataaaaaagtccgatctctgagaaaagataagatagaccgtagcagccaacgccaagtattccatactgccataattgcttcgctttttctttacgtgaggaatgaataaagaaccccttccaaataccgaacccgatacaaatccattcaagaatcataaaaagtgctgataatccaagcataaacaaaaccataattagccctcctgattatattaattcatgctgtattctcaggggtggttgtccttgttatgttatttatatgtacgtctttaaaaaacagtatggtccgtatgaaaagattttaaaagtttcgcacataacctaccccatttattttcaaaataaaggtggaggaggtttttcatgtgaagaatcttaaaatcatttggatatatcgtttaggattattgttacttgtttttctttgtctgctcgtctttttaaaaattaagccgctatgggcaccgattatttttgtatttaaagtagcaatcacgccgtttcttatcgcgtgttttattgcgtatttattgcaccctttaattgaaaaaattcataaggaagggatgccccgtacacttgccattttgctcatttatatccttttctttggcggaattggttatgggatttataaaggaacaccagtcgttattaaacagttacaagagattaatgaacaatttccgcagtttacaaaaatgtacgattcgtggatggatggcgttacagaacaaacggcgaatttcccttcgttcattcatgaaaaggtgaaacaactttttgtgggtgtggaaacgaagattcaagcgcttttaaataaagtgatgagtacagctcgtggtgtactcgattcattgctcattattttcttaataccgttcattgtattttacatattaaaagattatggtgagttttatcatatcttttggaaactagtcccaagtaaatggcgaggtacggggcaaatgcttgcgaaagaaattgataaatcacttggaagttatattcgaggacagttatttgtttgtttagtattagggggagtatcagctctttctttttggtttatcggtatgaaatatccattattgcttggcattattattggggtaacggatataatcccgtacttcggtcctattttaggagcaatcccgacgttaatgattgcagcaacagtatcaacgagtttacttattaaggcggggatcacaattgcgattttgcaatttgtggagagtaacattttatcgccttacatcgttggtaagtcacttcgtatgcatcccgttattattatgcttgccttactagttgggggagaggtagctgggattgtaggattgctaatatcggttccgattttagcagttattcgcactgtcattgttcatgtgagaccgctcttgaaaaaagaagatgtgtaagtatagaagccctctatgtaagaaatagagggctaatcatatatttatttagaaagctgctcgtgtatcttttgaacgagggagctcacatcatttgtttgaatatgttttatttttttccattcgttatcatacataaatacaatttgattgttgaaaagacgcttttgttcttttagattagaaatttttgcgaaagagtactcttcaaatattggattcttacttacatctggcccataaaagaatagccttttgttcgttaaaactagcattcctggccttgcgacggaacgataaataaatatgtctaatgaacatgctgcgtaaaataatatcgtttcgtcagtcgctaatatgtttttagctttgctaagtaaggttgtcattgtgatcgctcctttattttattaacaataatttaattataacaaaaaagtaatatttagaaatttttataaattattcttataaggagattccgatttattaataaatgcatactatatgaaaaggctgttaagaatgaatagtagaatacttatgattaataagtaattaatccaatataaatgattatctacattgacaaacttaagagaattctattatatttagtcatataatacattaaatcaatgacggaacaagtacgttacagtccatttatagagagaagcttccatatggctgaaagaagctttaaatgaagggtaacagaaagctaatcctgagagcagctaatcactgccgtcttgccacgttacggcaccatgaggtgatgaattgattgttattgtaatcaattcataattagggtggtatcgcgagttaactctcgtcccttttatagggacgggagttttttatatttaaggaggaaaatacaatgaaacaactaacaggcgcacaaattcgtcaaatgtttttagactttttccaagaaaaaggacatgcagtagaacctagtgcatcactagttccgcatgaagatccatctcttctatggattaatagtggtgtagctacattaaaaaaatattttgatggacgtgtaatcccacaaaatccacgtattacaaatgctcaaaaatcaattcgtacaaacgatattgaaaacgtagggaaaacagctcgtcaccatacattctttgaaatgttaggaaatttctcaattggtgattacttcaaagaagaagcaattacatgggcttgggaattcttaacgagcgacaaatggatcggattcgataaagaattactatcagttacaatccatccagaagatgaagaagcattcacaatttggaatgagaaaatgggcgttccaaaagagcgtattattcgcttagaagaaaacttctgggatatcggtgaaggaccaagtggaccgaatacagagattttctatgaccgcggagaagcttacggtaatgactttagtgacccagaattatatccaggcggagaaaacgagcgttacttagaagtatggaaccttgtattctctcaatttaaccataatccagacggttcatatacaccacttcctaagaaaaacattgatacagggatgggtctagagcgtatgacatctatcgttcaagatgtgcctacaaacttcgatacagacctattcatgccgatgattgatgcaacagaaacaatttctggtgaaaaatatcgtaatggcgatttagaaaaagatatggcattcaaagtaattgctgaccatatccgtacagtaacattcgctgttggtgacggtgctcttccatctaacgaaggccgtggttatgtattacgtcgtttattacgccgcgctgttcgttattcgaagaaattaaacatcaatcgtccatttatgtttgaattagtaccggttgttggagaagtaatgaaagacttctatccagaagtacttgaaaagaaagatttcattgcgaaagttgtgaagaacgaagaagagcgtttccatgaaacacttcatgatggtgaagcgattttagctgaagtaattgcaaaagcaaaagaagaaaaaacaactgttatttctggagtagatgcgttccgtctatatgacacatacggtttcccaattgaattaacagaagaatatgcagaagaagctggcatgacagttgatcatgaaggttttgaaaatgaaatggaaaaacaacgtgagcgtgcacgtgctgctcgtcaagacgttgattctatgcaagttcaaggtggtgtccttggagaaattaaagtagcgagcgaattcgttggttacggtacagttgcaacagaaagtaacgttgttgcacttgtgaaaaatggcgaatacacagacagcttacaagctggtgaagaaggacagttaattcttgatgtaacaccattctatgctgagagcggtggacaaattgcagaccgtggttaccttcttgctgatggcgtgaaagttcttgtaaaagacgtacaaaaagcaccaaacggccaaaacttgcataaagttgttgttgaagaaggaacattaacgaaagatgcggctgtaaaagctattatcgatacgaaaaatcgtagtagcgttgtaaaaaatcatacagcaactcatttactacaccaagcattaaaagacgtacttggaacacacgttaaccaagcaggttctcttgtaacttctgaacgtctacgctttgacttctctcacttcggtcaagtacaagctgacgaattagaaaaaattgagcgtatggtaaacgagaaaatttgggaaagtattgatgttgagatttctcaaaaagcaatcgaagaagcgaaagaaatgggcgcaatggcattattcggtgaaaagtacggagatgttgtacgcgttgtacaagttggcgattacagcttagagctttgtggtggttgtcacgttgaaaatacagcttctatcggtattttcaaaatcgttgctgagtctggtatcggtgcaggaactcgtcgtattgaagcagtaactggtaagtctgcatacgaattaatgaacgatcaagtaggtttattaaaagaagcagcaggaaaaatgaaaacaaatccgaaagatattttaacaagagttgatggtctatttgctgaagtgaaacaactgcaaaaagaaaatgaatctcttgctgcgaaattaagcaatatcgaagctggaaacttaactgattctgtaatgacagttgatggtgtgaatgtattagcagcgaaagtaaatgttgcagatatgaacaacttacgtacgatgatggatgacttgaaaaataaattagagtcagcagttgttgtattagcgtctgttaatgacgataaagtaaacatcctagcaggtgtaacgaaagacttaattagccaaggttaccatgctggtaaacttgtgaaagaagtagcttctcgttgcggcggtggcggtggcggccgtcctgatatggcacaagcagggggtaaaaacccagctcaagtcgaagaagctttagcatttgtacaagagtacgttaaatctgtttcaaaataaagagatagtagtgtacaatggtagggagaggagaagttcttctccctatacttactatataagtgaggtgcttgaaatggacggttttgataaaacaatgaagtttagcattcaagatgaaaaacagagtgtccatgtaaatgatgtacttttaactgtgtatgatgcacttcaagaaaaaggctataatccgattaaccaaatcgtcggttatttattaagtggagacccagcatacatacctcgccataaagatgcacgtagcatcattcgcaagcttgaacgtgatgagttaattgaagagcttgtgaagtcttacttgaaacatcatcgtgaggagtagtttatgcggatattaggtttagatgtaggtacaaaaacagtcggagttgcaattagcgacgaaatgggctggacagcacaaggattagaaacaattaagattaacgaagaacgaggtcactttggttttgatcgtatttctgagttagtaaagcagtacaatgtggacaagatagtagtaggtttacctaaaaatatgaatggtacaattggcccgcgtggtgaagcgtgccaacaatttgcagaaaacctacgagagctgttacaattagacgttgtaatgtgggacgagcgtttgtcaacaatggcagcggaacgtctgctcatttcagccgatgtaagccgtaagaagcgaaagcaagtaattgataagatggctgcagtcgtaatcttacaaggatttttagatagtaaataagaggtgaccaaaatggaagaaaatcaaattacaattgtagacgaaaaaggtaacgaacatttatgtgaaattattttcacttttgacgctgaaaaatttggaaaaaaatcatacgtagtcttctctccaatcggtgaagtagacgaagatggagaccaaatttatgatgcaatggcttatgagcaaaatgaagaagagggcggaactttacttccaatcgaatctgaagaagagtgggaaatggtacaagaaatgttcaacactctagctgatgagcaagaagctgaataataagtactgaaaagatggacgacatacagtccatctttttttgtatttatatgtaaaatgaaagattttttgtcgaaactgtgtaagtctttgtagtataatgagacggattgtagaaaaataaagtgtcaattaaaaaagataagtgaattttttgcgtttttacatcgtgctgtatagaaaggtgtacatacggtctacaattaagtaaggaggaaatgttttgatagagaatcaagtgaaaaagaagcgtagacgtatctttttattttcgattattgcactgcttttagtttgtggttcagtctatgcgtatatttcatccgcattaggaccagttgatagcgggaataaaaaagagattgaagtagaaattccgaaaggatcatctacaagtaaaattggagaaattttagaagaaaaaggcgctgtaaaaaacggtacagtttttagtttttatacaaaggctaaatcgaaaagtttacaagcaggtacatatttattaaatccttcaatgaatgctgaagatgtgattgaacaaatgtcatctggcaacgtgcatcgtccagctctttataaagtgacgattaaagaaggggcgcaagtaactgaaattgcagaaacgattgcgacagaactaaagtggaataaagatgatgttacgcgtcaattaaacgataaagcatttattcaaaaaatgcagcaaaagtatccgaagttattaacggataaaatctttgatagcaatattaaatacccattagaaggttatttatatcctgcaacgtattcgttttataagaaagatacgacgttagaagaaattgtaattccaatgcttgagaaaacaaatgcaatcattgttcaaaatgaggcgaaaatgaaagcgaagaattgggatgttcatcagcttttaacattatcttcacttattgaagaagaggcaactggttttacagatcgtcaaaagatctctagtgtcttttataatcgtttagcaaaaggtatgccgcttcaaacggatccaacggtattatatgcacttggaaagcataaacaacgtgtattatacgaagatttaaaggtcaactcaccgtacaatacgtatgttgtaaaaggattaccggtagggccgatcgcaaactctggtaaacattcagtagaagctgcgttagaacctgcgcaaacagattattattatttcttagctgcaccaagtggtgaagtgtactatgcgaaaacattagaagagcataatgcattaaagcaaaaatacattacgaaaaaatagtgaaatggggagggatagcgaaaaaagtcgcacatccctcttttttgtggtaaaatatatcgggttaaaaactggcagaagaatcgtttttaatatcaaaacgggacgtacaagctaaggataaagctggcttgtatttttattgcattctatgtgtgaaaagacgtcatagaggcacttctccatgtaaataaggaggaccatttatggaggatgcagttaacgagtacctattatcatttattgatccgaaagataaattaattcttgaaatggaagaatatgcaacagaaaatcatgtgccgattatggatcgacttggaatggaatttatgctgcaatttttacgtttaattggaccgaaaagcattttagaacttggaacagcaatcggttattctagtattcgtatgatgcaagctattccaaattcacgtattgtgacagttgagcgcaatcgtgagcgatatgaaaaagcacttgaatatatagaacgttccccagtaacagatcgtatttcagttatttacggtgatgcgttagagacaggtgaacaagtaaaagaacacgggacatttgacgttatttttattgatgcagcaaaaggacagtatcgtcgcttttttgacttatatgaaccgttattaaatcctggtggcgtaattatttcagataatgttatgtaccacggtcttgtaacgacaaaagagaaaattgaaaacagacgtacacgtggtttaatccgtcgtattaagacgtacaatgagtggcttatgaaccatgaaggatatgatacaacgattttcccaattggtgatggagtagctgttagtaaaaagagagggtgaccaaggtatgaagaaacctgaattgttagtaacgccaagagcggtggcggatatcgaacaacttgcgaaagcaggagcagatgcggtaatgatcggtgagcaaaagtttggtttacgtttagcaggggagttttcacgtgaagatgtaaaacaagctgtgaagattgcacatgaaaatggtgtgaaagtatacgtagccatgaacgctatgttccacaacgataaagtagaagaattaacagattacgtttcatttttaaacgaagtaaatgtagatgcaattgttttcggagatccagcggtattaatggctgttcgtgaagtagcaccaaatatgcagttgcactggaatacagaaacgacagcaacaaactggttcacttgtaattactggggacaaagaggatcaaagcgtgctgtattagctcgtgagcttagcttagatgaaattgttgatttaaaagaaaatgctgaagtggaactggaagtacaaattcacggtatgacttgtatgttccaatcgaagcgttcattagtaggaaactactttgagtatcaaggacgtaatcttgacattgaaaagaaaaaatatgaagagaatatgttcttatatgacccagagcgtaacaataaatatccaatttatgaagatgaaaatggtactcacattatgagtccgaacgacatttgtttcatcgatgaattagaggaactaatcgatgctgaagttgatagcttaaaaatcgacggtgtactaaaaagctctgaatacattattgaagtaacgaagaaatatcgtcaagcgattgatttatgcgtagaagatcgtgatgcatattatgacgtgaaagatgatctatataaagaaatagaagaaatgcaaccagtaaatcgtccgttagatacaggattcttctttaaagaaacggtttactaaacgaggagggtgtaggaaatgactgtacaagaaatttcacgagtgatcgatggcaaacgtgttattgtgaagaaacctgaactgttaatccctgcgggtaacttagaaaaattaaaagtagctatccattacggggcagatgctgtatatttaggtggacaagaatttggtcttcgttcgaatgcaggtaactttacgctagaagaaatggcagaaggcgttgagtttgcaaagaagtatggagcgaaaatatacgtaacaacaaatatctttgcacataatgaaaatatggacgggctagaggaatatttaaaagggattgaaaaagctggcgtaacgggaattatcgttgctgatccgcttatcattgagacttgtaaacgcgtagcgccttctgttgaggtgcatttaagcacacagcaatcactatccaactggaaagcagcacagtattggaaagaagaaggtttacatcgtcttgtattagctcgtgaagcaagctatgaagaaatgaaagaaattaaagaaaaagtggatattgaaattgaagcgttcgtccatggtgcaatgtgtatcgcatattcaggaagatgtacattaagtaaccatatgacagcgcgtgattctaatcgtggtggttgttgccaatcttgccgctgggattatgatttagttcaaacagtatcacaacataaagatgcaaaagagcttcctctattccaagaaggagatgctcactttgcgatgagtccaaaagatttaaatttaattttatcaattccaaaaatgattgaaatcggaatcgatagcttaaaggtagaaggacgtatgaaatcaatccattacgtagcgactgtagcaactgtatatcgtaaagtaattgatgcgtattgtgcggatccagataactttgagtttaaacaagaatggttagatgagcttgataaatgtgcaaatcgtgatacagctcctgccttctttgaaggggttccaggacatcaagagcaaatgtttggaaatcatagtaagaaaacaacgtatgattttgctggtttagtgttagattataatgaagaaacgggcatcgtaacgattgagcaacgtaatcatttcaaaccaggacatgaagtggagttctttggaccagaaatagaaaactttacgcaaacggtggagaaaatttgggatgaggatggaaacgaattagatgcagcgagacatccgttgcaaatcgtgaaattcaaagtggatcaacgagtgtatgtgaataatatgatgcgcaaaagcatacttcaataagaaagagtgatagtcgaatggggacgaataagcctgttgtaattggaattgctggtggttcgggatcaggtaaaacgagtgtaacgaaagcgatttttgaccattttaaaggtcattctattttaatcttagagcaagattattattacaaagatcaaagccatttaccaatggaagagcgtttaaaaacaaattatgatcatccgcttgcgtttgataatgatctgttaattgaacatttgcagcagttgcttgcatatgagcaaattgataagcctgtatatgactatacattgcatacgcgttcagaagaaattattccggttgagccgaaagatgtaattattttagaaggaattcttattttagaagacccacgtctttgcgagttaatggacattaaattattcgttgatacggatgctgaccttcgtattctgcgccgcatgcaacgtgatattaaagagcgcggtcgtacgatggattcagttattgatcagtacgtaaatgttgtacgtccaatgcacaatcaatttattgagccttctaagaaatttgcggatattattatccctgaaggtggacaaaaccacgttgcaattgatattatggtgacaaaaattgcaacaattcttgaacaaaaagtaaatttgtaatagcatagtaaaagatatacggtaggaagggattttttcccttcttatcgaatacaatgaaacatgcaacctcatctatatataggtgagggcatatttatatcaactttccatacatatcttctttatataaagaagaattggaaatacggggttgtatgtgacaactccgctagtgcaagggtactagaaacctccgctaacaatggaagcggaggagttttcatatggaactcctcttttttttcgggggattggtatataaaaggagtggaaaatatgtcaacagaaaaaacataccctatgacgcaagagggtaagcaaaaactagagaacgaacttgagcaattaaaaacagtaagacgtaaagaagtagtagaacgtattaaaatcgcacgtagcttcggggatctttctgagaactctgagtacgatgcagcgaaagatgagcaagcgttcgtagaaggacgtattacacaattagaaaatatgattcgtaacgcagttatcattaaagatactggcgaagtatctactgttgttacattaggtaaaacagtaacatttaaagaattaccaaacggagatgaagaagcgtatacaatcgtaggtagcgcggaagctgatccattcgaaggaagaatttctaacgattctccaatcgcaaaaagcttattaggtaagcaaattggtgagaaagtaacaatccaaacaccaggcggagaaatgcaagtagagattgtctctgtaaaataaaaaaagattctcctatcgggagaatctttttttctgtcgaatgaaaaaaattgtgtaaaccttagagtgattcgacaaaaaatgtcaaaaaaacactttaagctttgatatcataattagagaccataggttttaaaagggaaaaggggctaattatgaaacataaaatctttacaggattggtttgtagtatctccatattaggacttgctgcatgcggaacgaatgaagaaactacatcatcaaagggagaaaaagtgaagcaagaagaaaaaaaggatattaaagcaactgagagttcaaaagccttagaaaatccacaagataaaaaggaatttaatgattttgatgtagcgtatcaattagcaattgtcatgaaaatatttcaagatgtaacgattaagtatgattacgcaattgggaatccagattatttattgcgagattcgatggatcaaaaaacaatagatgatatgaagaatatgttacaagaacaggcgaagaataatgataaaattttaaaagatgaagtgaatcaagcatatacatatttaaaacaatcgaaagtaagtaataaagatgatattcaaaaaataatagatgcacaaaataattatttacatattgtagataagatgattacttgtattgattctgtaacagttgagaatgcaaaagaaaaaagaaatgaaatggataatcttagtaaggattatttaaaaatagcggctaatgtaacaaccactgtaattgaagttgctaaaaacactggagtgaatgaaactgaatttagatcgcttcttatgaaatttttagagaagccaaagaaacaataatagccttatataatatctgtttttgttttggagattgtataaataaaatagtacctcgtctaaactacaatagacgaggtgttttttatgaaaataaaacggagaattacaattgttttaatttgttttatgagcgttatgtttgtattgctttgtcgtttaatccaaattcaaattatagatacagaatcatttactgatcgcaaaataaatttaattgaaaaaagtgttacgcaacgcacacaatccattacagtagacgatggacgtgggcagtttatagatcgtaatggtaaaaaaataggtgaggaaaaatatcctgttttaattatttttccatttttacaaataaaaaatgacatgttagagaaaatcgcgcatatcattggtgtgtcgagacaagagattagaagacaaatgaaaaataataaaaatgcatttacactacaaggagaaactgctccatttcgagtgacacgagagcagatggagaaggtaaatgaattacatgtattaggtattgtagcagctgaagtgcgattaaaacaaactggagagataaatcatttaattggtgatgtaggggagaacgaaagggagtttcaaaagcgatatggagaattgaaaagaatctcaaaacaaacgccgataggtatttcaggattacagcaatcatttgatgaatttctattgactgatggagaggcaaaagtattatatcaagtagatcggcaaggagaaccaattttcggaaagcaagcgaaatacacttcaccaggaaatccattttatccagttaggattcaaactactttacataaagagttgcagcaaaaagcagaagaagtgattgaagcgaatgaaataaagaaggggggactagtattacttgatgtaaagacaaatgaaatattagcgatggctagtaagccgtctttacaagtaagggatgagaatttatataaaactacacttgaaaatcaaatgttaacgccacattttccaggctctgtttttaaaacagtagttgcagctgcagtcattgatcaaaaagtaaatttgtttaatcggacatttaactgtaataaagatttatatggtgaaaacgacccgcaagttaggatgggtacacttaactttaaagagagctttgctaggagctgtaacaggacattttccgagttaggtaacgagctattacaaaaggataagacggtgctagaaacatacgtagcagctttaggagcaaatgaaaaggttggatggaaaggttctgtatttcatacacctcattttgagcaaatgccagaagaaaagggtactactatttgggggaatgaagaaaataaaaatagtaaaaaagcggtagaacaaacagcaattggacagaaagatgtacgtatatcacctctagcaattgcaaatatgatggcgacgattgcgaggaatggagaaaagatggaagtgaaagcagttgaaaaaatagtatataaaaatggagcggatttttttacatttgagagccatacgttaaatggaaaacagctttcgtatgaaacagtgaaaacattacaagagttattaagaggcgttgtaacaagggagaaaggaacaggaacggcattccgttcgttgccactaagtgtcgctggaaaatccgggacagcgcaaacagggaaagggacgagggtgaatcgctggtttgcaggttattttccgtatgagaatccaagatatgctttagttgttgttgatctagagactgatagcaaagtgaataaagttacacctatttttaaagatatggtaggagcaatctatcaattggagaatgaaaagtaatcttgcaatttatagtgaaatgtcttcatttcatgaaaatatcattgtaaatgttcaacctttctagatttaatgttacaatagcaattaggaaaaactgcatggaggtttggagaatggcaggaggatcaagattccaacagaaacaacaaaaacgtcgtcaaaacggtgttttaaatattgcaatcgctattgtattactattagtagctattgtagcatatcaattgttcgttcctagtacgaaagagcaagcatcttctactgataagaaagtctctcaacaaacaacaaagaatgagaaagctggaaaatcagaagataaagaatctgctaagaaaaaagaaaaagaacaagagcaagcagaagctaagaaaaaagctgaagaagagaagctaaaggctgaagaagaacagaaaaaagctgaagaagaagcgaaagctaacgagaaagtatcagctgagaaaactgtatctaaggcaaaagaggcgtatacaaaaccttcttggaaagctgtaggaacagaacaaggttcatcaccagcgatgacgtttaaacagggttcatcagattggaatgagatgcaaagtgcaattgctgcaggtgttgaagtaccgaaagagcaattagtattccattttgttggaagagacaaaactggaaagagcaaagcttatggtgatgttcaagataagcaaagtgggaaaagatattatgtaaatattgattgggtagacaatgagggctggaaaccagtacttgttcaaactctaaactaaaaaagagaggctccttaggagcttctcttttttgttaacgcaatttctttaatttaaaatgaacaaccgcgctataatacggtcttttgctttcaggatccataaccatttgatgtgagatgtgatgaacttcaagcataagtgctttattattatcaatttgttcactaatttttcgttctaaagaagctaagtctcccgcttcaaaaaactctactttatcttctaacatttcaaaggtaaatgacatgaagacggcccctctcctatgtaatcaactatagtgtaacaaagaaaagaaggaaataccatgtacatttcaattgacatttttagaaagagggaatatcatactgataaaaccgataagaaaaaggggaatttttatgggtacagaatttaatggtttatttgatgagtgggctcatacgtacgactcatttgtacaaggcgaagatatacaatataaagaagttttcgcccattatgaggacattctagaggatgtagttaacaagtcatttggtaatgtattagaatttggtgtcggtacaggtaatttaacaaataaattattacttgctggccgcacagtttacggtatagaaccgtcgcgtgaaatgcgcatgattgcaaaagagaaattgccaaaagaattttcaattacagacggtgattttctttcgtttgaagttccaaattcaattgataccattgtaagcacctatgcatttcatcatttaacagatgatgaaaaaaatgtagcgattgcgaagtatagtcaattgctaaacaaaggtggtaaaatagtgtttgctgatacgatatttgcagatcaagatgcatatgataaaactgttgaaacagcaaaacaaagaggtttccaccagttagcaaacgatttgcaaacggaatactatacacgtattccagttatgcagactatttttgaaaacaatggcttccatgtaacgttcacgagattaaatcatttcgtttgggtaatggaggcaactaagcaatagaaagagggattagattgagaattgctgtaattggagcaatggaagaagaagtacgtattttacgtgacaaattagaacaagcagagacagaaacggttgcaggttgtgaatttacgaaagggctattagcagggcatgaagtaatcttgttaaagtctggtattggtaaagtaaacgcagcgatgtcaacgacaattttattagaaaaatataagcctgaaaaagtaattaatactggttcagctggtggattccatcattctctaaacgttggtgatgtagttatttccactgaagttcgtcaccatgacgtagatgtaacaacatttaactatgaatatggtcaagtaccaggaatgccgcctggatttaaagctgatgaggcgttagttgcattagctgagaaatgtatgcaggctgaagaaaatattcaagttgtaaaaggtatgattgcaacaggtgattcatttatgagtgattcgaaccgcgttgcagccatccgtgataaatttgaaaatctttatgcggtagaaatggaagcagcagctgttgcacaagtatgccaccaatatgaaattccgtttgttatcattcgcgcactttctgatattgctggtaaagaatcaaatgtttcatttgatcagtttttagatcaagcagctcttcattctacaaactttatcgtaaaagtgttagaagagttaaagtaatgtaacaaaaaggcaactgtctcatataaagaaaatacatacagttgccttttctttattggcaaacaagggggagaacacgatgaatgtatatcgtggagttcatgagttaattggtcatacaccaattgtagaaattactcgtttttcacttccgaaaggagtccgtttatttgcaaagcttgaattttataacccaggcggaagcgttaaggatcgtttaggaagagaattaatcgaagatgcgctagaaaaagggcttgtgacccagggtggaacaattattgaaccgactgctgggaatactggtattggactggcacttgcagcattagaacatgatttacgtgttattgtttgtgtaccagagaaatttagtattgaaaaacaagaattaatgaaagcactaggtgcaacggtcgtgcatacaccgactgagcaaggaatgaccggtgcaattgctaaagcaaaagagttagtaaatgaactaccgaattcatactctccaagtcagttcgcaaatgaggcaaatcctcgtgcatattttaaaacactaggacctgaactgtgggacgcattgaatggagagattaacatatttgttgctggagcaggaactggcggtacgtttatggggactgcatcttatttgaaagaaaaaaatatagatattaaaacagttatcgtagagccagaaggatctattttaaatggtggtaaggctggttcacatgagaccgaaggaattggactggaatttatcccgccatttttgaagacatcttattttgatgaaattcatacgatttctgatcgaaatgcatttttacgagtgaaagaattagcgaaaaaagaaggacttctcgttgggagctcttcaggagcagcatttcatgcgagcttacttgaggccgagaaggcagcaccaggtacaaatattgtaacgatttttcctgatagcagtgagcgctatttaagtaaagacatatacaaaggatgggaataaaaaatgagagcaaagacaaagttaattcatggtattcgcataggagaaccttcaactggatctgtaaacgtaccgatttatcaaacaagtacgtacaaacaagaagcagttggtaagcatcaaggatatgaatattcacgtacaggtaacccaacacgtgcagctttagaagaaatgattgctgtattagaaaatgggcatgctggatttgcatttggttcaggaatggctgctattacagcgacaattatgttgttctcaaaaggtgaccacgttattttaacagatgatgtttatggcggaacataccgcgttattacgaaagtattaaaccgtttcggtattgagcatacatttgtagatacaacaaacttagaggaagttgaagaagcgattcgtccaaatacgaaagcaatttatgtggaaacaccaacgaacccactactaaaaattactgatattaagaaaatatctactcttgctaaagagaaagacctattaacaattattgataacacattcatgacgccatattggcagtcgccgatttctttaggagcagatattgtgcttcatagtgcaacgaaatatttaggaggtcatagtgatgtagttgcaggtttagtagttgtaaatagcccacaactagcagaagatcttcactttgtacaaaactcaacaggaggtattcttgggccacaagatagcttcttactacttcgcggtttaaaaacattaggaattcgtatggaagaacatgaaacgaattcacgtgctattgctgagttcttaaataatcatccaaaagtaaataaagtatattacccaggtcttgaatcacatcaaaatcacgaattagcaacagaacaagcaaacgggtttggtgctattatctcatttgatgtagatagtgaagaaacattaaataaagtacttgagaaactacaatactttacacttgctgaaagcttaggagcggtagaaagtttaatttctattccatctcaaatgacacatgcatcaatcccggctgatcgccgcaaagaattaggaattacagatacattatttcgtatttctgtcggtattgaagatggtgaagatttaattgaagatttagcacaagcgctagcataataaaaaatgcactgctctatattagcagtgcgtttttttattacgtctattttgtgaaacatttcacaaaatagacatacacaaacgaaatgatttcatgtatattgaattcaggaaacgttactcacgaacaaacttgtgaaacttttcacaaacaatgaaattcatgtaggaaagcatctctatttttttgtgttaattgggacttattttgacctacagggacatataaggaccgtaatagtagaataggaggaaattcacatggtagtcaaagagaaagttgtaaatgaaatgcaggaagtaaaaaagatgattgatacgctagtaaataatggtcaacaagctttacaagcattagaaagttttacacaagaggaaattgacaacattgttcatgaaatggcattagcaggtgttgatcaacatatgccgctagcgaaattggcagttgaagaaactggccgtggtgtatatgaagacaaatgcattaaaaatatttttgccactgaatatatttggcatagtataaagcaagataaaacggtagggattattcacgaagatcctcatgaagaaataatagaaatcgcggaacctgtcggtgtagtagctggagtaacaccagtaacgaatccaacgtcgacaacaatgtttaaagcgttaattgcgataaaaacaagaaatccaattattttcgcatttcatccttccgcacaaaaatgttctgtggcagcagcgaaaaccgtatatgatgcagcgatgaaagctggtgcaccaaaacactgtattcaatggattgaaagaccgtctgttgaagcgacgaaacaattgatgaaccatgatggtgtagcactcgttctagcaactggaggcgctggtatggtgaaatcagcttactctactggaaaaccagcgttaggcgttggtcctggtaatgtaccgtgttatatagaaaaatcagcacatgtaaaacgagctgttaatgatttaattttatcaaaaacatttgataacggtatgatttgtgcatcggaacaagcaatcattgtcgataaagaaatttatgatgatgttaaaacagaaatgattgaaaacagttgttactttgtaacagaagaagaaagaaaaaaattagaaaagctcgttataaatgaaaatacatgtgcagtaaatagtgatattgtagggaaatccgcacagtatattgccgatttagttgggatcactgttcctggacatacaaaaatgcttgtagctgaaattcaaggtatcggagcagcatatccgttatcccgtgagaaactgagtccagtattagcttgtgtgaaggcaaattcattagaagaaggatttacatattgcgaagaaatgttgaacctcggtggtttaggacattcagcagttatccattctacaaataaagatgtgcaaaagcaatttgggttacgtatgaaagcttgccgtctcattgtaaatgcaccttcatcacaaggtggaataggggatatatataatggatttattccatcacttacacttggttgtggttcatacggaaagaattcagtttcccaaaatgtaacagcgactcatttattaaatataaaaaggctggcaaatagaaaaaagaatatgcagtggttcaaactgccaccaaaaatttattttgaaaaacatgctacagcttatttagcaaatatgcctaacatttcacgtgcatttattgtaacggactccggaatggttgaacatggctatgtcgatacagtcgcgcactatttaaacaagaatgcaaatgatgtgaaagttgaagttttctttgaggtcgaaccagatccatcagatgaaactgttttcaaaggtgcggaaatgatgaaaagctttaagccagatgtaattatcgcacttggtggtggttcagctatggatgcagcaaaaggaatgtggttattctatgagcatccagaaacgacattctatggtattaaacagaaatttttagatataagaaaacgtacatgtaaatatccggaattaggaaataaggcgcagtttgttgcgattccaacgacatcaggaacgggatcagaagtgacaccatttgcggttattacagataagaaaaataatataaagtatccgctcgcagattatgaattaacaccagatgtagcaattgttgatccacaatttgtaatgacagtaccaccacatgtaacagcagatactggtatggatgttttaacacatgcaattgaggcgtatgtgtctgttatggcaaatgactatacagatggattagcattaaaagctattgatctcgtattcaaatatttaccgagagcatataaagatggaaatgatgaagaagcaagagaaaaaatgcataacgcttctgcaattgcagggatggcatttgcaaatgctttcctcggtattaatcacagcttagcacataagattggaccagaattccatattccgcacggacgcgcaaatgccattctaatgccgcacgtagtccgctataatgctattaagccaagaaaacacgcattgttcccaaaatatgagcactttgtggcagatgaaagatatgcacatatagcgagaatgctcgggcttccagcaagttcggcagcagaaggggtggaatcactcgtccgagcaattattgagcttggaaaaagcttaaatattaatatgagtattgcgggacaaggagtcgataaagagcaatttgaagaggttgttggagtattagcagaaagagcttttgaagatcaatgtacaactgctaatccaaagttaccgcttatttcagagctgaaagaaatttatatggaagcatataaaggtgaataatgataaaaaaagagccgcagtaaaagcggctctttttttattggaaaacatctcccagaatggctgtatttactggtctttcagtttcatagaatatgatacagtgaaatggaggagtgagaatataatgaaagaattaaaaggaaaaatagaagattatactcggtttggacaaatgcttctcgctgtaagtacattgttaatggttggcttattgattccgagtggagcaaaagagacaatccaattttttgttatgatggggagcatcgttatatttttaagcttatcgttctttttctttcagcgtgtgaaagtgatgcgtgaccagctagaggaaaatgaatgtgaataatattgttaactagagcgcagcgaaaagaaaaaatctttttgtcgcgctttttgttttttgtaggaaaatatatgtgtttcgtgttgacaatgataatccttatcaattaaagtataatagtagttaatgattatcattatcgattagaggtgaagaaatgaagaaatctattacgctatttacagcgattttatccatttttttcttgttaataggttgcagtgccaaaggggacgaaaaagcgtctgcaaccaaaacagaaaaaggaaaagagaaaatcgaaattaccgacctatcaggaagaaaggtaacattcgataaagtgccagaaagttttgcaacattaagtatgggggacatggatattattcatgctttaggtggaaaaatagtaggtcgcccggatacgaaattaactcttccagaggagttaaagaaagcacaagtaattgggaatgcacatcaaccgaattttgagcaaattgctagtttgaagcccgatgtacttgttgctaacaatggattccaaaagaatgtgccaacggttgaaggacaaggaacgcaagttatcatttcttctgcgaattctgtacaagatattcaaaagaatattgaattatatggaacggtaatgaagaaagaagataaagcaaaagaaattaatcaaaaaatgaatgatcaaatgaagaaatatgagaaaaaaagtgatgtgaaagcattgctagtgtatggcgcaccaggaacttatttagcggcattaccaacatctttatcaggtgatattttagaaaaaacaggcggaaaaaatattgcttctgattttccagaaacgaaagaatatccgcaatatgcacagctaagtgtagaacgtattattgaggcgaatccagatgtcatttatttaattacacacggagatccaaaaagtgtgaaaaaagcatttgaaggcgaaatgatgaaaaatgaagcgtggaaaaatttagaggcagtaaaacaaaaccgcgtagttattttgccacctgatttatttggatctaatcctggtacaaaagttacagaagcaatggactttatgtataaaagtatacaagatgtaaggaaatgatacgtatggaaagtagtgaagtagtaagagaaaaggaacatccttttgcgaaaaaaagatggataatagcagttactttagttgtattaacaatcctaggtctcttttacggtctcttcgcaggaagtttatccttttctgtacgagatattttaacaggtatacaagaggaaggttcgacagttcatcgaattgtatgggatcttcgcataccgagagtgctcattgggtttatagtaggaacatgtttagctgcatctggtacactgctacaaggggttatgagaaaccctcttgcagatcctggtattatcggagtttcatctggggcaggccttgtagcaattgtcatcatgattttattcccacagcatctagcttttttaccactaggggcgtttttaggagctttcataacagcaatggttatttatgctttatcatggcaaaaaggggcatcaccttcaagaatcgtcttagtaggggtgtcgatcaatgcattaattggtgcagcaacgtcagcattaatgttattacatagtgacaaagtacaatcggtgttaccgtggctagcgggcggtattggtggtgtaagttgggcacatttaaacatgattatttattatgcaatattcgccattatattagctttctttggtattaagcatattcgagtgttaatgcttggagatgaaatggcaaagttattaggacataacgtggaaaaaagtcggttttatttaatcgtagtaagtacattattagctggaattgcagtaagtgtgtctggtcttattggatttgtcggtcttgtcgtaccacatatgctacgtttattagttggaaatgattatagatatttgctacctttatcatgccttggcggcggggtattacttgtttttgcggatgcaatagctcgaagttggtttgacccaatcgaattgcctgttggtattttactgtccttcttaggtggtccgttcttcttatatttaattcatagaggaggaaaacaaagtgatttccgttaacaaagtgttttacgcacactctgaaagatttcaaatgcaaaatatgaatgtacatattaaggttggagaaatcgttagtttaattggtccgaatggatcgggaaaatctactttgcttcgtttaatagcaaggctactgaaacaaagcgaaggggacatcattttagatgggaaaaatattcatatgatgaagagtgctgatgtagcgaagcaattagcaatgttaccacaaatgcatgatcatcaattagatttaacagtgaaagaactaattgagttcggaagaggtccacataaatcatggagtagccacttaaataaagaagatgaagaaattgttgattgggcattgtctgttacaaatcttgaagggtatgaatatcgtcttttacattctttatcaggaggggaacggcaacgtgcttggattgcgatgacgctagcgcaacgtacaaatgtcttattattggatgaaccaacaacctttttagatatcgttcaccagttggaagtaatggaacttgttaaacgattaaatgaggagtttggaatgacaattataatggttttgcatgacattaaccaagctgctcaatatagcgatcgtttacttgtattaaagcgaggaaaaattcagtatgatggtataccagaagaagtactatgccatgaaatgtttcaacatgtgtttggcatagatgtagatatttttcagggaagtgacaagcctttttttacaccgaaacgaatttctaaaaggggagaagagcgatgcaagcagaagagcgtattaccattgaattagtaagagaatttgttatggcagctcacggggatttagagaaagtacaagagctattggttgaatcaccaagcttacttcacgcctcttataattggggtggatcagattgggaaagtgcgttaggcgcatcggcacatgtaggtcgtaaagatattgctctttatttactagaaaagggtgctcggatggatatttttgcagcagctatgcttggtgaattagaagttgtacaagctattttagtagctcaaccagaagcattgcgtgcatctggtcctcatggtatttctcttcttcaacatgcacgaatgggtggagagaaatctaagcgtgtatatgattatttagcaatactatcttaatgaacggaagaagttcttatgtgcggtaaacttttcacttgaaacaattggaaagtttaccgcccgttagaacgggataagtatctagtatatttgaaaatcctacacccccctcaattgtagttttctttatgctagttatgatatggatgcagtggacaatatttgtctactgctttttttgtttctataagattgaatattctgtgttatgtagttgattcatttataataaatggtaacatttattgtgcatacaaaatatgatcgtgaaattaagaataaattagtggaaaggagtgaaggaatgtttcatacagaccgtttacaaattcgtaaatatacaatggatgatttacagttctacgcttcactatggggaaacgaaaaagtaatgcgctatattggaaacgggaagttaaaaacatatatgcaatgtaaaaaaagtttggaggagtgggtaattcctagctataaaaacggcctcggtttatttgtattaattgaaaaggaaacgggaatacggattggtcatgcaggattagtaaagcagcagatagatggaaaagaggaaattgaaattggttattggttattacctcagtattggggaaaaggctatgcgaaagaagcagcggcagcatttcgagactatggcttccaagcgttaagaatgaataaattgatttctcttattaatccggatcaccccgcctcaatctttgttgctagaaaaacggggcttagttatgagaaaacaacttcatttcatgggatggatgttctcgtttattccattaggcgcgttggatgaaaaaaggttaattgcattttttgaagaatggtatataaaaataaaggggggattacatgtacatttatcataatggacttattattcgtgagggaacgaatggtgtacctgcatatgcaattaagactttatttgaagatgccggttggagcaatgataatatcccttcttggcaaattgaaaaattcacgatagcatttgaaaattcaacatgggcattcacaatttgggatgaagaagagatgattgccatggttagagtcgtttctgatggaatcatggtcgcgaacatagtaaatttagttgtgaaatgtgaatatagagggaagggattaggtaagaaacttgtcgctctttgcttgcaaaagctaccacatggtgactggtttgcacatacttctgcgaacaattttgatttttatagaagctgtggatttgaagttagagagctatcgagaaatggaacatgtgcgtattatggatatcaagtcgcgaaaagagatggtcaccgataaatgaatgaaaagtaaaagtttagcgaggtaattttgaggatttgataatagagaatggattgaggcacattttatgataaaataaaagaaaattctgtttattattagggggataaaaatgagtataaaagttggggatgtatttaaatatgaaagaagatttactgaggaagaggtgtttgaatttgcaaatattaccggagataaaggtagacaccatgtggaatatgatgaaaatggaagattaatggtccatggtttattgactgctagcattggaacgaaagtaggcgaagaattacattacatagcaagagaattagtaagtgagtttattagaccagttttcacaggagatacgatcacttgtgaattaactttaacaaatgttgagcaaatggaaggctataaaaaagtttcaatcgagtcagtttatcgcaatcaacacgaaaagactgtactagtggggacaagttatggaattataaggggataaaaaagaagcctgtttagcaggcttcttttttattatttagtaaacacgttttcgattttccgcataactagagatgagtagtaatgcagtttcttctcctatattacgaacaatatgaggaacgcatgcattccatgagaaagaatcaccttcttctacaattgcaatatcttcaccgtgctgaacttctagttttccgcgtaatacaaggtgacattcttccccttcatgggcatttggtgagttttctttcgggaatccagtagggatttctactaaagataggcgaaggcccccttgctccgcaacatgttcaattctttgctcatctttgccgtatacactgtatttccgttcttcttttttgacaatttttaatcgatctttttgctctaacaataaatagggaaggggaacgtttaaaaaattggagatcgtttctaaagttgagatagatggtgatgttttattattttcaacctgactcataaatcctttagaaagacctgttccctcacaaatttgtgcgattgttatgcccctacgttgacgaatttcacgtattgcagaaccaatattcataaaatcaagctcctttttgtaaacaactatttgtatcatagcaaaaaaaatatattttttcccagtgaaaatgaattgacgaataaaaaaaattagtgtatgttttgtaatgtaaataaaagttttgtataagaaaactataaaggagagaaagaaatgaatcaacatattggtaacttaattattcgtatcgtgttaggggtaacattcttcatgcacggtttaacaaaattccaatcaggaattgacaatattgcagggtggtttacaagcattggtttaccaggaggacttgcatacggtgtagcaacatttgaattagttggaggcctattattaattctaggtttaggtgtaagatatattggattattatttgcacttgttatggttggagcaatcgtaaaagtgaaatggtcagctggtttattgggagatggaaaaaatcctggtttcgaattagaacttgcattattagcaatgggtgcatacttatttgttgcaaaagctgatggttttgtagataatttcttaaaagaaaaaatgtcaaagaagaactaatttaaatggggggctaacaagatgagttttcaacttcatcccgatacaacactggatgttgttcatttatacgtatctaatgtaaagaaatcactagagttttatacggaagtactaagtatgaaggtgctaaaagaagaaaaagcagtcgttacatttgggaatgaaaatgatgaaccacttcttatcattgaagaaaagaaagaagcttttccgaagcaaagaggaagaacagggttatatcattacgcaattttattaccaagtaggcaggatttagcgaatgttcttcgtcatcttgtagaaatggtatatccactacatggtggggccgatcattactttagtgaagctctttatttagctgatccagatggaaacgggattgaaatttatcatgatcgacaaaaagaagtttggcgtgatgagaatggagagctcccatttgttagtaacccgttagctggtgaagaattattgcagcaaggaagtacatggagtggatttccagctggtactgtgatggggcatattcatttccatgtagctgatttagaggaagcgaaacgtttctatgttgatggtcttggttttgaagtaacaatcccagctcgtaatggagcgttgttcgtatcagcaggtggctatcatcaccatatcggtttaaatacatggcaaggtgaaggggtaccaccgcaaatgccaggttctgttggtttgaaatatttcacaattgtattagcggatgaaaaacaaaaagagcaagtatgtgaaagcttaaaaaatattggtaagattgctacgtacaaagatggaatattacaagtcgaggatccatttggacattgtatccatttccaaataaaaagagaagcctaaaaaggcttctcttttttattttcttataattgcattttcgttttgtaaaaatagttcatcaaattgttttgcaagctcaaaatctagtttcgttaaaccttttgcattccaagatgacaaagtaataataactgctttatactggataaggataaatggatggtgattatgttcttctgatagtttggcggcttcagagacaaattcgactccttttaagtagtcggaaaacatatattttcgttcaatccatttctcatcttttaccatccatttatctaccttcaataattcctcgtgaacttcttcttcagttaatcttagcatcatttttcacatcctttattggaagtaacgcaagaccattgttaataaggcgtgttacagcttcgtcagttgtgaaagtagaaagttgatgtagtaatgctgcagatgtttcatgccctttgttatgctctaaaagtaactctaatacttcaaggcgcagcaaccattctttcgcataaaatttatttaatacttcttgaattgctactaattgatcgatatgcgcgtcgtgtaaaatcccctcacttcgaatatctcgaactgtttgatacatacgctcgagttcattcagtacaagcggagcaggaatttcttgaacttcttcatccattgggaaaaatgctgctgcatctgcggcacctgggaatactgaagtgatttgtgagccaacagccatatcaaatgcgccccatgaagcatcaaataaaacgcgggcgttataagtaactgtgcaatcgataaaggaaataagagcaattttcttatcatttttcacaatatctgttactgttccttttacatgaataccacttgcaaaagtaaactcagcgatagttccaattttaattcctaatgattgtagttgttcgtctgtacaattttctaatgcaatattttcagtaagtaatccaatcggtgttccaaatccgtcactgtgtacagaagtagaatgattcgctaactgtttattatgaagcgctaatgccgttggcgaatttgttcgcatgtaaattaattcacctgcatcgttttcaattgtctcgctaaatgtacctgtgatttgtaatccactatttagctcagctgttgcatagttctcagagcgaattgctttttctaaaccttcttttccacctgttttaaaggccatcgttttagaaaatgtttcaagcgcatctgttaattcttcaaaggattcacaaacaaatagttgtggttgcatttttgttacgtcataagttgtccctgtacatgcttcgatagaaaatggaaccttttctacagcgtctgttaagcaatgtttgctttcgccaacagaagaaaggagaccagcaccatatatctttggatcatctatatttccgatcaatccatattctactgtccaccagaaaagacgtgaaatttgttcagcttccgataaaccagaaactaagttttgtttttcaattacagcattttcagcagccttaacttcatcaggagtagaagtagggctttcttttactatcgttaatgtacgaacagcttcaaatgcatcatgttcttcttttgtagagaaagcttttgcaccaatttgcccaaaacgtttcacatattttgcatatgtaggatcaagtaaaatcggtgcgtgtcctgcggcttcatgtacgatatctggagctggtgtgtactcgatattttctactttccggatatctgttgcaatcggtagtaatccgtgtccttgaaaatcgaagaatgctacgccaggaataagtccgtcaattgttacagcgccccagccgcttggtgccaaacactcattcatttcttctacttttggaattgcatctatattaataccagatgattgtagtccgttcacataggctggatgagcaacgtcttttaagaagctatgattttgtctcataatgtaacgccacacagcgtgattcaccggtgtgtattgatcataatgttgtgtggatacaaatggttttaaatgcgatggaatttctgttttctttgtcatttagacatcctcctttttttcaataaaattgaatatcgatttcgtatagcttgtatcaccccctttcattttttttgtaagcgcttataaaattttatcataagattcggaattatttaacatatgtttctgtgataaatagaaaaagcccctatcggaaaatccgataggggcgaaagaatcgcggtaccaccctatttgtaagtgaaaatatacttacatctcaattaatgataacggaaaaattccgtcttttcctccatgcataaaagcattacgaaaaagaagctccagaattgtaattcatacttatatatgtgctaatttccaccgaccattagctctctgtaacagggatataagatactactgcgattctttcaacgcgtatatatgaaattgtgtaagaggatggatgcaaaaaagtccctatcggaaaatccgatagggacgataaaaatcgcggtaccaccctatttgtaaacaactaattgtttaccactcactttacgataacggaaagatccgtctttctcttcatgcataaaaagcattacgggaaagaagctccagaattgtaattcacgcttgtatatgtactgattcgcaccaaccatcagttctctgggacagtgatataagtcgctactagcattccttcaaagccgatatataattcgttaaactaaactatgttttgtattataaaactatattaaaaaaattgtcaacaaaaattttttatcccgtgttaatgagcagtaaaattcctacctcaaaattcggtgggagaataattgcccgtaacccccgattggtgaaggctaataatcagtggggatgaacaaaatctctactgattaaggtttcactttatttcacttctaaattaacagttaaattagaggtattgccagctgcatcagttgctacaatgtgaatagtatttttttcttcgtgtaattgagtgcgatcgaaataaatgtcatagcttttctcccaagggttcaggaatgcctgttcccatacaccatttccgttaatttcatattgcattctcactggaataccaggtgctttttttagctcagcatgataagactgagcattactattttgtaaatctggagcatgctgaatattactttgagcagcgagaggtgcatgttgcaattctacaattactgatatttcttttgttgttttcgtttcaacattttgagcaattttatgttctccccactgttcaatcgttgtttttaattgtggactaaattgcttctccttttgtagtgattcagcatgagcgcttaaagctccaaaactagaaaagacaagcgccatgcttaatagtgtagatgtagtttttttcattgatactccccctaataaaaagtgacaatattcagaaattaaatcttacattttagttataacttataaatataaatgttggctaaactatactttcaacataattcataccaatcctctatgaattgaaaatttcttgggaaattttttctgattatgtcgaatcgatatttttcacatattgtaggaagaaagtgaggaatgctatgagggaaatggagtgatggtatgaaaaggctaatagtaagtggtagtgtagtgttgtttatgtttttgtgttctatcactattactagcgcagaaaataatagtgtgaaagttgcttttattcgtcatcataacctttggattaaagttgaggggaaagaaaaacaacttacaaaaggagagaacataacagggccaaagtggtcacatgatggagaatggctggcatatgtaaaagggaagaaacaaaatattcttgagttatatcggctgaaagatggaaagaaagttacgccgtttcactcagaagcatcgaattatcaatggtcaccaacagaaaatataattgcatttatatttacaggtacattaaatacatttgatgtagaaaaaaagaatgcagattttgaaaatgtatcggctggtgtaggggattatgcatggtaccccgatggaaagaactttcttgtatcctctgaagcgcacttacttccaacaggatggacaggggctcagctatatgaagtgcaaaaagatgcacatatgaatcctcacaaaatgaagcatttgtatgcattgccaaatcaacatgatgatttcctagcgctagtagcaagtggctttaagtggtcaccagatcaaaagtggatttcatttttagcagtaccgacagcttcatggtcagctgatagtaatacgctttgcttagttcgtgcagatggcagtcggtttgaaaaagtagatcaaatgttactaaacgcacaatggtttcaatgggcaccatcaaaaaatatattagcttatattgaagggagcggaagagttgcattagaaaataagcatttaaaagtaaaggaattgccagcacttcagcagaacatatttacgccgaaaggatatgttgattgggattttgtatggaagaacgatagagtaattatcgtttcacgagcaaaggaggcagggatagaaactccaccagaaaaaaggccactaccatctttgtatgaggtcgatagtacaagtaatgcacagcatcaaatcacaaagaaaaagaacaagcaaggggattaccacccgatcttcatgaagaagagtaatcaattaatttggatacgttcagaccgtaagaaagcggatgtatggcttgctcataaagatgggaaacaggaaaagaagtggattgaaaatatagatgtaccagcgtggtattatgagaaatggaattgggaaaatgtcatctcggtgaaataacaataaaaaactgcctaaaagatcattttaggcagttttttattgttatttatgcgttttatttggcttttttttcgctgggtttccgttcccttggcgctttctattttgttcatcttttgcttgtttttcatgtagtgtatctaaaaattcattcgagtatataaatgctaacttaaatatgtacattaacgcttgaataaatatgtacattttcgaataacgttttttgacacttgggggtagtgcaaattcttaagttgatgggcatgtgtgctttcccctcagatacattttgagtgagtcgataccaaagccaaaggtcattaatgatggaagcaagatcggcaatttctgaatttagtttacaagaaacttcgaagtcttcttcgttatttaaataatgttgttttttattaatatagtgctcaagttcttttatacgatcaggaattttcccgcgaacttgttcccattttagtaaaatagcatgttgcattttttcggggatttcttcccagtcttcttgtaaatgtggaatttcaattcctagatgttcatcgtataagaaatacttttccataagttcacccccgttttcctgcttatattgtacagaaaaacagaaagaagttcgacgaaattgtttgaaaaaatttgaaaatgactcttgatacattttgtgaaaggtgttaaagtgtgaattattataaaagaaaatgaatatttattctttaggaggatgcaaaatggagaagaaaaaagttgtattagcatattccggaggtcttgatacttccgttgcaattaaatggttacaagagaagaattatgatattatcgcgctttgtttagacttaggggaaggtaaagacttagcatttgtaaaagaaaaggcactttcagtaggtgcaattaaatcatatatgattgacgttcaagaagaatttgcaaacgaatatgcattgatggcgatgcaagcacacacattatacgaaggaaaataccctcttgtctctgcattatctcgtccgcttattgcgaagaaattagtagaaatcgcagaacaagaaggcgcaactgcagttgcacacggatgtacaggaaaaggaaatgaccaagttcgttttgaagtttctatccaagcattaaatccttacttagaagtgattgcgcctgtacgtgaatggaaatggtcacgtgaagaagaaattgcatatgcaaaagaaaacgatgtaccaattccgattaatttagatagcccgttttcaatcgatcaaaacttatggggacgcagcaacgaatgtggaattttagaagatccatgggcagcgccgccagaagatgcatatgagatgacattagcgttagaagatacaccgaataaaccagagtttgtagaaatcggatttgaagcgggcgtaccgactactttaaatggcactgcatattcacttgcagaattaattaaaacgttaaatgcgcttgctggaaaacacggcgttggacgtattgatcacgtagaaaatcgtcttgtcggtattaaatctcgtgaagtatacgaatgcccagcagcaatgacgttaatcactgcgcataaagagttggaagatttaacacacgtaaaagaagtagcgcattttaaaccagtgattgaacagaaaataacagaacttatttataacggtttatggttctcacctttaaaacaagcgcttcatgcatttttacaagaaacgcaaaagaatgtaacaggtacagtgcgtgtgaaattatttaaaggtcatgcgattgtagaaggacgtaaatctgaatactctttatacgatgaaaaattagcaacatatactgcccaggacgaatttaatcatgatgcagcagttggattcatttcattatttggtttaccgacgaaagtatacagccaagtgaatcaaaagaaggtggaagcgtgagcaaactttggggcggacgttttactgaagaagcggaagcgtgggttgaagagtttggagcatccatctctttcgatcaacaattagtaaatcaagatataaacgggagtattgcacacgtaacgatgctagcaaagcaaggcatcgttacgaaagaagaagcagagaaaataaaggtaggtcttcaatatttattgaaagaagcaaaagagaataagctacaatttttagtagaagcagaggatattcatttaaacatcgaaaaaatgttaattgaacaaattggcgaagtaggaggaaaacttcacactggccgaagtcgtaatgatcaagtagcgacagatatgcatttgtatttaaaagaaaaggtagaacatattataaaagctacaaaacaattgcaaactgttcttgttcatcaagcagaaaataatattgaaacgattatgcctggctatacgcatttgcaacgtgctcagccgatttcatttgctcatcatattctcgcttacttttggatgttagagcgtgatgtaaatcgttatgaagattcgttaaagcgtattaatatctccccattaggagcaggagcgctagctgggacgacattcccgattgaccgagaatatagtgcggagcttcttggatttaatggaatatatgaaaatagtttagatgcagtaagcgatcgtgatttcatcttggagtttttaagtaactcatctatgcttatgatgcacttatcgcgcttttgtgaagaacttattttatggagtagccaagagtttcaatttattgaaatgagcgatcaatacgcaactggaagcagcattatgccgcaaaagaaaaacccggatatggcggaactaatccgtggtaaaacaggcagagtatacggtaatttattcagtttacttacagtaatgaaaggattaccgctcgcttacaataaagacttgcaagaagataaagaaggaatgtttgatacagtaaaaacagtagaaggatgccttcatattatggcgggcatgcttgaaacgatgactgtaaacaaagaaaaaatggggcaagctgtgacgcaagatttctccaatgcaacagaaattgccgactatttagcaaacaaaggactaccattccgtcaagctcatgaaattgttgggaagttagtgctatattgcacacaaaaaggaatttatttattagatgtctcgcttgaaacatataaagaaatgagctctttatttgaagaggatttgtatgaagttctttcaccatatgcggctgtaaagcgtcgtaatagttcgggtggaacaggatttgaacaaatcaaaaacgctttggagaaggcgaaggggttaacgaaagaatttattaagaattgagttgggaagtacgccagtctagtaaagtctggcgtactttgttttttaataatatttaagttacaatatagtaaaaaataacaatttaggggaagtctatgaaaaaaatagtgtttatcattgtactggtaattagtttaattgcaaatgctaaagtgtttcttttggacaaatatatgtatgttggtgaaaaagaaaagcgagaagaagcgattatcgcaacgatgtggcatttgcaagataaaggatataaagaaagtgatattttatatataaaaccggccttttatagcaaaatggattcgtatggaatgaatgtgcagtttaaagatgaaccaaatgaatcatatacatatagagttttaaaagatacgaaaacaaataaactaactgtacaccaagatagcaatgagcaaggtggtatgggcgggaagcatcaagagcttaaataaagaaagaaaacgactgatggcattcgcctgcagtcgtttttcttttaatcatacttatgtcgttcttccgtaattcgaatatactcaatatccatcaaatctctaagtaatgcaccgttacttagttcaacgccatgtttctctttaaaatgagtacgaatcgtatctagcatttcgagttctttcccattcacatctaaaataatacgttcagaatcatccatgttgcatcctccttttttacacatatatattttgtccgtctatttctaaaaaatgtatgttaacgtaatgttaggaaataagaaagggatgaaaaatgagacgtatttattttatagggttaattttgtacacgctaattgtattacacgttgcattcccaaatatcttttcatttgaggatttagaaacagtacacgttgcgatatttatttttgctctatttgtagtagattgctttatttctatatggatttcgaaaagaaaagatatacaaggtgaaaaagaaatggaacggaaaaagagaaaacattcattttggatgatgacatactgtttgtctttagtgcttactgctgctttttttagtgaacatattccattagaaagattaaatattggatttggagcgttcgtattcgcatactattttttttatgcactttcttccttatatgaaagaaaagcgaggagaagaggaaaatccgcttgtagaagaagcgaaagaacaagagagtaagagaattgaaggagatataaagaaacttggagaacaaaaatggtatttaaaatcaaaaatcatatatgttctttgcttcattacgccgccaatcggctatttgtacgtcttcttacttcgtaaaaaaatgacagagggtgcaaagcaaacgtacttaacgatcgcgacaatcatgatggcgttatggtctttgaagtttcttccgccttatgtgttggcaattaccgttgttgtcgtagcatgtcttgtgtttatagtgaagtttatgaaatgaaaaacaccaagcctatgtggacttggtgttttatctataaattaaagctcaccttgctcttcatcaccacgaacaacaaggacatcgcatttcgcatagcgaataatatgttcagagacgctaccaattaggaaacgctcaacagcatttaaaccagtcgcaccacacataattaaatctactttatggtttggagcgatttcttttgaaatttttgatttaggattaccgaattctaatacagtttcaattttttcaagaccagcttcaagcgcagtttttttgtagtcttctaataagtcttctgcaaatagatttgcccgttcagcaattgcacggctataagcttctactgctgagtatgcttttacatcaacgatatgagcaattgttaatgttgcattgttgcgctttgcgacttgaattgcttttttaaaggctttttctgcttctttagaaccatccaccgcgattaaaatatttgtatatgtattattcatagtaaattcctcccaatctgttttataactgtttacaacttaattataaaacaaattttggtaacgtgcttgccagaaacgttacagaattttgaaaactctgtttcaattcattttagttgtaattggagcgagaacttgttacatatgaagtatagcaatttaaaagggggcagttttgtgagacatgcgctcattacagccggtacgaaaggtttaggaaagcaagtaacagaaaagttattggctaaaggctattcagtaacagtaacgtaccatagcgataccacggctatggaaacgatgaaagaaacatataaagatgtggaagagcgtctacaattcgtgcaagcggatgtcacgaaaaaggaagatttacataaaatagtagaagaagcgatgagccattttggcaaaattgactttttaattaataatgctggtccatatgtatttgaacgaaaaaagttagttgattatgaagaagatgaatggaatgaaatgattcaggggaatttaacagcggtatttcatttattaaaacttgtcgtcccggtcatgagaaaacagaactttggccgtattattaattacggatttcaaggggcggatagtgcaccgggatggatttatcgttcagcttttgccgcagcgaaagtaggacttgtttcattaacgaaaacagttgcttatgaagaagcggagtatggtattactgcgaacatggtatgtcctggtgatattataggcgagatgaaagaggcaactattcaagaagcacgtcagctgaaagagcataacacaccgattggtagatctggaacaggtgaagatattgcaagaaccatttcgtttttatgtgaggacgattccgatatgattaccggtacaattattgaagtgactggtgcagtggatgttattcatagacatcgatagaataaaataagatgaagtttcgaataattggacagtttatccattgtgctgagaggtgcggataatactgtcctttaatataaaattaaatctatcggaaaactcgtgttatttttttgtcaaatattgagatattatgttaaaatataagagcgtagaaagcgctttaaaaaaatgattcaggggtcatttcataactcaagggggaactaatcatgcgtatcggtattccaacagaaattaaaaacaatgaaaaccgtgtggcaatgacgccagcgggagcagtacatttagtacaaaatggtcatgaagtttttgttcaaaaaggagcaggtttaggatctggctttacggatgaagaatacgtacaagctggtgcgaaacttgtagaaactgctgaagaagcatggaatcaagatatggttatgaaggtaaaagagccagtagcaagtgaatacggctatttccgtgaaggtttaattttattcacatacttacacttagctccagaaccagaattaacgaaagcattaatcgataacaaagttgcatcaatcgcatacgaaacagtacaattagacaatcgttctttaccattacttgcacctatgagtgaagtagctggtcgtatgtctgcacaaatcggtgcacaattccttgagaaaaacaaaggtggtaaaggtattttacttgcaggcgttccaggggtaaaacgcggcaaagtaacaatcatcggcggtggtcaagctggtacaaacgcagctaagattgcagtaggtttaggtgcagatgtaacaatcattgacttaagtgcagaacgtcttcgtcaattagatgatattttcggtaaccaagtaaaaacattaatgtctaatccatacaacattgcagaagctgttaaagaatctgaccttgttattggagcagtattaattccaggtgcaaaagcgccaaaacttgtaactgaagaaatgattcaatcaatggaaccaggttctgtcgttgtagatatcgcgattgaccaaggtggtattttcgaaacaactgatcgtattacaactcatgacaacccaacttacgaaaaacacggcgttgttcattatgcagttgctaatatgccaggtgcagttccacgtacgtcaactcttgcattaacaaacgtaacagtaccatatgcagtacaaattgcgaacaaaggttacaaagatgcttgcttaggcaacactgcattactaaaaggtattaacacattagatggctatgtaacattcgaagcagttgcagaagcgcacggcttacaatacgctgatgcgaaagagcttcttgaaaaagctcctgctttatcataatagaaatacattcgagaccttcctttatgaggagggtctttttttatggagaaataacatgtgaataattgttatttattggtgtaaatcattttttattatgataatttagaattatataataaaaagaggggattcaatggggagtaaaaagaggaagaaaaagcaagcaaagagacaaaagtacataaagaaaaaacaggagcagaacatacctttttcacaaaaagtagtccttatgatagaaaaagtatttcgatatatttgtatgttcttgtatgtgattttttgtgtgtttttatgtgggatggttaaatgtttggggataacacctaatgttattgaaggtatttttggcgttatgcttgttatggtagaaggaatcttattctttatattatttgataaggtttggcctagtcatgaaagtaaaaaagatagaaaaagaagcaaaaaatcttcatccaattcaagctcatcaagtggattcggtgactacagtagcaacgattgtagcagctcaagtgatggcggaggagattgcggaggtggtggagactaagttggtttttcagaagaacgactaatggaaggatgggatgaaatatggaaactgtgaacttaatagaattaacaaaagacattcaagatcaacataaaaacttcgtcgtttcaaacataaacagtcattgcttacgcatcgctgtatttactggtgaatatgattggcactatcattctaattcggatgaattatttattgtgctagagggagagttacttattgattttgaagatggagaaacggcggttttaaagccaaatgattctattttaattccagcatgtacgattcatagaacgagagcattaaagaggacggtaaatctttgttttgaacatatagaggctgatacgattatagtggagcaattatgaaaaaattatctgtagccgagtatagaaaaatcattccgattttggaaagtaatacaagaacgacgacatttgcttatgcggtatgtgatcaaatggtagatggtgaggtttttgccaacgagaagttaacagcaggattaattcgtacagttaacggtatctattatttatttggtcatacggatgatcaaaattataatgaagatttattgatgtatttaaaaatggctattgaaaaaacagagaagagatttacactattcgcttcaagtgaagagtgggaaatgatgattgaagggtgttttagtaatgtacttcggaatatgccacgaatgaaattccaaagagaaatctttgaagagcgaacacaagatgcaaataaaaatacatatgcagtgaagcgtattgataaaagtgatatagaacgaagcagtgaatttacagaggagtactacaaaggatattggggatcaaaagaaacgtttttgaatagtggttttggattttgtatagaacaagatgggataattgtagctgaatgtgtctcaatatttagcgggaatggttatgctgaaatagatatcgcaacacatgaagcatatcaaggaaaaggattagctcaagctgttgcgacacggttcgttgagcattgcatgcaaaatgatattacaccgtgctgggattgttatgtagacaatattccttcgcaaaaactagctagtaaattaagttttcataatccgatagaatatagattgtttgtaagtaagaaaacgggggaataaaaatgaatgtggaattaacgagatttaaagttaagcctggtaagagtcatcgagtagatgaatggatgcagcttcttaatgacaatatgaaagaagtccttttgacattaaacgacgaaaagatgtacgttgagacaattttccgggaaataagagatggagaagagtacttatattggtattctgtgcaaggagaaggcggggctcttgtcgaaaattctcattatgaaatcgataaaaagcacttagcgttttggtatgaatgtattgatgaagaagcaatgtctattgatatgaaaacagaagttgttatgattcaagatgttgtgagggaagcgatggagtaatagagtaatattttgtgaacaaaaaacagtcttatttttttgctgaaatatatattattggagatgctataggatgagaattagtaataaatatatcactctcgatgaaatagagataataagagaatccttaaataaattgcatgaatatcataataataaatcaaaatatttttctggcgattacccaagaatgacatttgaggaacgtattgaaaattataaaaagaactcaaagtacggagaatatagaattgaattattgattgagtcagaaacagataatatattaggattttgtatagcgtatagtaaaagcgtaagcggaaagattgaagttttatttgttgatgaaaaataccgaagaaacggatttggtttgaaattaatgaatagtgcagtggaatggtttaaagtgaaaaagatagatgaaattgaattaacagtagtgtatggaaatgaagctgtatcattttatgaaaagctgggattttatcctcgttcaattattatggcaactaagtcataacgatagtatggggagagatgagtgggagtttttgtttcaaaaaaatggttcatattttactaaattatatgtgaagagcacatcaaaataaatgtgctttttattatggaaaaatttataaaagctgtatttggatatctttaagtgaaaataaagagggatatcgagaatattttaggataaactataaagtgaaactttaatcagtggggggggcatcccctactgattatcagccctcaccaatcgggcttttacgagcagtccgcccccccctaacttctttgcttccgctgaattttgatgtgggggtcttactgcctgttaatgcgggataaagaaataaaaaacaccaaaacaaaagacttaccaatatacggtgtagtcgtaacaggaaaacagaggatttacaaagtttacaagggtcaccgtatattaaggctgctgtaagaggtgtaacagttgagaaatattgattacgagtaattaatgtgaataatcagaaaacttatgttataatatgggaaaaggaggtttatatgaggcaaatacatggagcaatttatatttacataacaatgtttttcgtggcgatatcctatggattggggcacgtgtattcgcatcctatactaacttttttaagcggagcatgtatggcgtttgcgcttcttgtccaccttttctcagtttggatcgtgaaatttcaattaaatattagtgaaatagaagaaggcactttctaagtggccttctttttttaataatattttggaaggtcttgcagcaatttttcaattttgcattcggtttcttcacatatagacagtgtgcgtagtcggaaaaacaaactacgtaagaaagattttatatttccgtataggtactcgtacgattcagtatgtaatgtctgttttttgacgggtaattgagctactaattcatgaagggctaataggagtacctcttcctttagaccattttgtagcattgcgacaatcggataaacgagacgttcgtcttcttcatatttgtagtaaatagaatggacacaaactttgtttaataaagtttgtaatatttcttcgtaatataaagtttccagtttaggactacgaacaagcgcctcaaatgtatcagaagcgtgagcgatactatgtgcccagccgtggtcttgcacatatccgcggaaatcatgctcgttgttcatatataacactaatcgatcttttacatgtaaaagatcagcctgtgataagaaattatgatttgtatcggcatcaataatgagtgcaattaataatgttgtaaatgcacgggtaaataccgcatcttcgtcatccgaatgaatcttatacaataaatatttgtcactgatgctttctaataatagtttctgtaattgtgtgtgtgaaaggtagtcctttttgatgagatggtaaaaagtagagcaaataagtttgtcccttaaatagctatcggtaacaccgatatgtttaagcatattggaaattaaagaatccatgttaattgtatccattacgtaatgattattacgaatttcttctaactgttgttgtaacatataaaccacctattttagaaaattctgtattttaatagtataataagaggaagaaatagacaataaataaatgcttttgaatggaggggggcattatgaagagagcattattctttttcattagtattttctttttaggaagctgttccatttcgtatgttactttttctagcgagagcaaaagttggactggacaatataaagggcatattaaggatgacagtgaagatgggatgtttacgtttcaatataagggcggggatggaaagacagaatttaaaaacttagagattgctattaatggagcctttagtacaatgacacaaacgtcagaagttcatagaggagcaaagattgaaatgaagtcttcttgtgtaagttgcgcgcctatctctaaagatgaacctatagaagttgtgattaaatgggatgataagtatgaggagaagatggtgctaaatttgaaatagtagagaaatagaaaaaggcagcaatcccgctgccttttttattattttacaaattgtaattctttcgggaatttcgttaaaatttctgatccgtcttttgtgatgtaaatatcatcttcaatacgaacgccacctacgtttggtacgtaaatacctggctcgattgtgaagaccataccttcttttaatggagactcgttgccagcttttacatctggatattcgtgtacgctaattccaagtccgtgacccaggcggtgtgggaagaagtcaccgtaacctgcatctgcgataacagaacgagcagcgttgtcgattgcgccaagtgtaacacctggtttacatgcttcaactgcttgtagttgtccagcaagtacagtgttgtaaatgcgagtttgctcttcagaaatttcaccgaatgctactgtacgtgtaatatcagagcaataaccatcaatgattacgcctaaatcaaatagtacgaaatcgccgcgtttcattttgtttgcgccaggaataccgtgtggaagagcagagttcgcacctgctaataccatcgtatcaaatgacattttatgtatgccttttgtttttaattcgtgttcaataattgctaatacttctagctcgctgcggttttctttaattgcatttacaccaacttcaacagcatagtccgccattttagctgcttcgcgtaaaatagaaagttctttttcatctttaattaaacgaagttcgcgaactttctcctcagctgatttgaaagctgcatttgggaataatttcgttaattcttcgtagcgctctacgtttaaatgttctttttcaattgcaactgcatttgcattgatgccgcggtctttaattgcttttgcaatcatatcccatggtctgtcagtatcagtaaatccgataatttcatgtgcccagccagcgttacgcgcttgaccttcttccattttagggcaaattaaaataggttctttttcttggaatacaaacataccaagtaatctttcgtgtggttcacagtggaagtttgtcatgtagaagacgttcggtgtagaagttaagaacgcagcttctacgtttttttcttttagccattgcattaaattttctaatctagcattcatcgattggcacccccgagatatttaattacaaatataactttaactcggaagaaagtgttatgacaagtaaatagatgttagaaaagacagggaattgaaaaatcatgtagaataaaaagtgagaatgtgaataggggaggaatgtaataatgaaagtatcttatcatggacattcagttgtgaaaattgaggcgaatgaaaaagttattttaattgacccgtttttaacaggtaatccgaaaacagatttaaaagctgaagatgtaaaagtggatgcaatccttttatcgcatggacacggtgatcatgttggagatacagtagagcttgcgaagaaaaataatgcagttgttgtagcgccatttgaactagcaacatttttaagttggcaaggtgtaaatacacacccgatgcatattggtggttcacatgaatttgacttcggaaaagtgaagtttacacaagcattccacggctctagttatattgatgaagaaaataagacgattacatatacaggtatgccagcaggtattttatttacagcagaagagagaactgtataccacgcaggagatactgcactattctctgatatgaagttaattggggaattaaataaagttgatctagcatttttaccaattggtgataatttcacaatgggaccagaagatgctgtactagcggcaaaatggattaatgcgaaaactgttgtaccgatgcattacaatacgttcccagttattgaacaagatccatatcaatttgtagaaaagctacaaaattgtacagggaaagtattagaagctggagaaagtattacactatagaaaagaaacccttcatttgaaaagaaaagtgaagggtttttacgtgtgtaggacagcttttaatacttgtatttgttttggtgattcttttcttttggtacgtggctgctcaggtgtttcattcaattccattgtaacttttttcccatctacgaaagctaaaaatacagcacctacaacctctaaaagttttttcatcatgtgttcgctcctttgttttatttcttgtcttaattgtataggtaatcaagtgtgcgaactatcgaatgagatgacaatagcattacattgttgtaatagaatgactggtggaatgtaagagtcattttgttataaaaaaaatagtacaggtatgcaaagagagagtgtaacagttttgaaaatatagtatactgaaagtacaacacatgaagaatttagggaaaagaaagtatggtgaaaccatttggctaccaagcataaccaaattttagaacatattaatagcctgccagtaggccataaaatttctgtaagacaaattgcgaaagatttgagtgtaagtgaagggaccgcttaccgtgcaattaaagatgcagaaaataaagggtatgttagtacaattgaacgtgtcggaacaattcgaattgaacaaaagaagaaagagaatatcgaaaaactgacatatgcagaagtcgttaacattgtcgacggtcaagtacttggaggcagagaaggactacataaaacgttaaataaattcgtaatcggggcaatgaaattagaagcgatgatgcgctatacagaagctgggaacttacttattgtcggtaaccgtacgaacgcacatcaattagcgttagaaactggagccgctgtattaattacgggcggatttgatacggaagatcatgtgaagaaattagcagatgaattaaaactgccgattatttcaagtagttacgatacctttacagttgcaacgttaattaaccgtgcgatttacgatcagcttattaagaaagaaattgtactcgttgaagatattttaacgccaattgaagaaacgttatatttaaagccaaatgatacagtgcagcaatggcatgcctataatgaagagacgatgcacggaaggtatccgattgttgatgaaagtaacaaagtgctaggaatcgtgacttcaaaagatatgatcggtgtagcgaaagaaacaccaattgataaagtgatgacaaaacacccaattacagtgaacggtaaaatgtctgtcgcagctgcggcacgtatgatggtgtgggaaggtattgagttacttcctgttgttgatgaaggaaataaactacaaggtattattagccgtcaagatgtacttcaggcactgcaaatgattcaacggcagccacaagttggagaaaccattgatgatattgtaacgaatcaatttatgacgccgaaagaagcgaagaatgagcatctatatcaattttcggtgacgccgcaaatgacgaactcaatcggaacgttatcgtacggtgtatttgcaacaattgtgacagaagcgacaaatcgcgtcattcgtgcgcaaaagaaaagcgatttaattgttgaaaacttaacgatttatttcgtaaagccggttcaaattgataatgttgtatctgttcatccgaaagtattagaaattgggcgtaaatttggtaaggtcgatgtagaggtgcatcatgaaggtaatgttgttggaaaggcattacttatggtgcagttaatcgataaataaaaagatggaacaaatcgttttgatttgttccatctttttttgttgttttaaatttgaaaggcatgattttagatgggagttttagtgaaatatgtatggagtggagtggaaaagtaacgtaagaaaagacagaatagtaattcaatttagttgtatattgtgttatgattatattgtaagaaaatggaattctgaaaggtggtatgcattatgtcgtcagccgtactcttttttggtagtatcgcactattttactttcttgtaatgataccgatccaatatttatatttacaaggtttacatgaaaaaaaggaaaagacaggattatctcagcgagagctatatgaaaaaatgtcttttggagaagaacaactacattttcatgtacaaggtaacccatttaatataccatctgcgtttgttgcatatatgattttgaaagttaagggacgtaaaaaagcatcacaatattgatgcttttttatgttgcttcatagacttcggcttctttaactgctaatggcaagaaatgtttgtattggcgaaacccgttaaatacacttgcactaccaaatagaacgaataaaacaccaacgataatacgagcggttgaaagttctaaaaagaattggtttatcccgaaaaataaaacgaatgaaccgagtgccattgcggattttcctgagagccaacctttctccattgggcggtttgtacgaaagtattttgttttgtaaaagaggtacaacataaatgagatgataatacagaagactaatactggcatagtgaacactcccatcgctttgtgaaaaataatagaaaagaaaaagaaatatctaaactttctaacttttattataaagcaattgttcgcatgaatgaaatactttccgttataatggaggataaagtgaagaagttgattaaaaaggagattatacatatgcatgagcaaattttaggagcaattaaagagtttgatacaattattattcatcgccacgtgcgtccggacccagatgcgttaggttcacagggtggtcttggtacaattctacaagaatcgtttccagagaaaaatatttatacggttgggtacaatgaaccgtcactagcatacttacgagtaatggatgatattgaagatagtgtatacgaaaatgcgcttgttattgtttgtgatactgcgaatcaagaacgggttgacgatcaacgctatacaaaagggaagatgttaattaaaattgatcatcatccaaatgaagatccatatggagatattacgtgggtagacacgacagcgagttctacaagtgaaatgatttatgagttttataactatggaaaagataaaggattaaaaataacaaaagaagcagctcgccttattttagcaggaattgttggagatacaggtcgtttcttattcccaaatacgacagcaaaaacacttcgttacgtaagtgagcttgttgatatgggtgtgaaattcacagatttatacaatgaaatgtataagacaaaagaaaaaattgctcgtttaaacggttatattttacaaaactttacgatggtagaagaaggagcagcttacattaaattaacgaaagaagtattagaagagtttgatgtacttccttctgaagcatctggtgttgttggagcgcttggcaatattgatggattaaaggcgtgggttctatttttagaggaagatgacgtaattcgtgttcgtcttcgttcaaaaggaccagttataaacaaattggcaatgcaatataacggcggagggcatccgatggcttctggtgccaaggcatcttcttgggaagaagcggatcgtctttttgctgatttacgtgagatttgtaaataaaagactatatgttagaacgaaaagaaggagcggcgctaaagccctccttctttatttttctttctctatagtaatgctaatttcaagcactgtatcaaaagatattgtatcgactttaaaacggtataggcgatcgtaatgtttgtatgttttattttcgattaccttttttagtaggtctttattttttgcgatactttgaatgtttttcgttaaaagatgctggagatcattatgaatagatgtagtcatattttcgagtgtaagattgtctaaatcgtatttttctcgattgataagttttattttaatctcttgaatggttaagagccgtttattttcagtgttcaatttttcttgatcttcgagaaggacgtggagctttgcttcttgtttttctataatttctctttgttctgctattttactagcttgttcttgttgaaaaacaccgtatatgtacaaaaaaataaaccagctcaacacgcctccaacagcagcaccagctaatactaagtaccatctttttgctgtattggcacttggtactctcatacatgttcctgcgttagccatttaataataatgagacctgtttgcataccaccagttgcgaaaaaaataaggagaatttgttttacgatatctttcatatctccgccaaagaaacttctttcaaagctataaaaggtatcgaatgttccgccgattgctgcaacgagtgcccaaattcttaaattttgggcgaattgattaatgtaagttagagctggttttccgataagaaacgcaccaaatccaccaattaatgaaccgccaagtataaccccaaaggcaataaaataactaataataagcagagagaaaaaagtatgttctcttacatccatcgtcattcccctttcttcttcatatatatggacaaagtataagaagtatgttttgatttccgctttcctcatcacctataataaaagtagtcaaataggtaaagagagggtacaacagtgaagtttgtgcatttacaatgtcaaaccgtttttagtttattaaaaagtgcttgtaaaattgatgagcttgtagtcagggcgaaagaacttggtttttcatcgctagctattacggatgaaaatgttatgtatggtgttattccgttttataaagcatgtaagaaacatggtatacagcctgttattggattaaccgcttctatttttagtgaagaagaagaaaggtcttatccgcttgtattacttgctgagaatgaaataggctaccaaaatttattaaagatttctagcagtattatgacaaagtccaaagaaggtattcctaagaagtggcttgcgcattatgcgaaaggattaattgctatttcgccaggtaaagatggcgaaattgagcaattattactagaagacaatgagagtcaggctgaagaagtagctcgcacgtatcaaaatatgttcggccatttttatatgagtttgcagcatcatgcaattcaagatgagttgcttttacaagagaaactacctgaatttattagtagggttaatattccagtcgttgcaacaaatgatgtgcgctatatcaatcaaagtgacgcgcttgttcacgaatgtttactatctgttgaaagtggaacgaaaatgactgatccagataggccgaggctgaaaacagatcagtattatttaaagtcatcggatgaaatggaagcactattttcccatgcgccggaagcaatccaaaatacaataaaaattgcagagcgttgccaagtagaaataccgttccatgtaaatcaacttccgaagtttcctgttccgtctaatgaaacgagtgatatatacttgcgtcgtgtttgtgaagaaggtttgcggaaacgatatggtgaaccgaaagaagtgcatataaagcgtttggatcatgaattaaatgttatttctcgtatgggatttagtgattatttcctcatcgtatgggattttatgaagtatgcacatgaaaatcatattctaacaggaccaggtcgtggatcggcagctggttcactcgtttcatacgtattagaaattacagatattgatccaattgaatacgatctattatttgaaaggtttttaaatcctgaacgtgtgacgcttcctgatattgatattgattttccagacgtaagacgtgatgagatgattcgctatgtgaaagataaatacggtcagctccgtgttgcgcaaattgtaacgtttggtacgcttgcagcaaaagcggcaattagagacattgcccgcgtaatggggcttccgccgcgagatattgatatattttcaaaacttatcccatcaaagcttggtataacgttaaaagatgcatatgaagaatcacaatcacttcgtgagtttatacaagggaatcttttgcatgagcgtgtgtttgaaatcgcaaaacgtgtagaaggtttaccacgtcatacgtctattcatgcggctggtgttattatgagtcaagaaccgctaacaggcagtgtagcaattcaagaaggacataacgatgtttatgttacgcaatatccagccgatgcgctagaagaacttgggttgcttaagatggactttttaggattacgtaatttaacgttacttgaaaatattataaaatttatcgcgaacaaaactgggaaagaaatcgatataagaaacttacctcttcaagatgaaaagacattccaattattagggagaggagatacaacaggtgtattccagcttgagtcaggcggtatgcgaaatgtacttcgcgggttaaaaccgaatgagtttgaagatatcgtagctgttaactcgttatacagaccaggaccgatggaacagataccgacttttattgaatcgaaacatggaaaaagaaaaatcgaatatttacatccggatttaaagccaattttagaaagaacatacggcgtcattgtataccaagaacaaattatgcaaattgcatcgaagttagcagggttttcgcttggagaagcagatttactgcgccgtgcagtgagtaaaaaaaatcgtgatattttagatcaggaacgtaagcatttcgtccagggatgtttgcgaaatggatatgatgagacgtctgctgaaaaaatttatgatttaattgtaagatttgcgaattacggttttaaccgaagtcacgctgtagcttacagtatgatcggatatcagcttgcctatttgaaagcgaactatacgctggaatttatgacggcattattatcaagcgcaattggaaatgaagataaaattgtacagtatatacgagaaacgaagcggaaaggttttcacgttttgccgccgtctcttcagagaagtggttataacttccaaatagaagggaatgcgatacgttacagtttactttcgatccgaaatattggaatggctacagtgacggcattattagaagaacgagagaaaaaaatgttcgaagatttatttgaattttgtctccgtatgccgtcaaagttcgtaacggagcgtaatttagaagctttcgtctggtcgggatgttttgatgattttggtgtttcgagaacgaatttatggaaaagtattaaaggggcgttagagtacgcgaatctcgcacgtgatttaggagatgctgttccaaaatcaaaatatgtacaaggagaagagctatcttttattgaacaactaaataaagagaaagaagtacttggcttttatttatcaagttatccgacagcgcaatatgtgaagttagcaaaagaattagaaattccatctctcgctcaggcgatgcgacacaagaaaaaagtacaaagagctattgtgtatataacaagtgttagagtgattcgtacgaaaaagtttcaaaagatggcatttattacattctgtgatcaaaatgatgaaatggaagcggtcctcttcccggaaacgtatatacatttctcggataagttgcaagaaggagcaattgttttagttgacggtacgattgagctaagaaatcataagctgcaatggattgtaaatggactatatccgctagaggaaatggatgtttatgaagaaaagaaagacgcatctgtttacgtgaaattgccatctcagtatgagaaaaagcttttaaatcgggttacgaaaatattgttcgactattcaggttttgcgaaagtactaatttattatgaaaaggaacataaaatggtacaattatctcggagtttatcgattcatccaagtgaagaatgtttaggagcacttcgtgaaattgtcggggaagaaaatgtagttgtgaaaatataatggacaatttccctacacttcgattattatagtagtagtgttcgtggtcagaccacttggagaaattgatatcagcaagaataatttgaggagagtggatagtttgtcaacacttcgtgaagaagcacttcacatgcataaagtgcatcaaggaaaattagaaactgtatcaaaagtaaaagtagaaaatgcaaaagatttaagtcttgcatattctccaggggttgcagaaccttgtaaagaaatttatgacgataaaagtaaggtatatgaatatacgatgaagggaaatatggtagcagttgtgacagatggaacagctgtacttggtcttggtaacattggacctgaagcatctcttccagtaatggaaggtaaagctgtattattcaagagctttgctggtgtagatgcattcccaattgccttaaatacaaacgatgtagataaaattgttgaaactgtaaaattaatggagccaacttttggcggcgttaacttagaagatatcgcagcaccaaactgcttcattattgaagagcgtttgaaaaaagaaacaaatattcctatcttccatgatgatcaacacggaacagctattgtaacagtagcaggtcttgtaaatgcactgaaattagttggaaagaaaatgtctgacattaaagttgtcgcaaatggcgcaggtgcagcaggtattgcaattattaaacttttatatcgctatggtgtacgcgacattattatgtgtgaccgtaaaggggcaatctatgatggtcgtcctacaggtatgaatccggtgaaggatgaagttgcaaaatatacaaataagaatcgtatagaaggttctttagctgatgttgtacaaggtgcagacgtattcattggtgtatctgcagaaggtgcattaacagaagagatggttcgtacaatgaatgacgatgcgattatttttgcaatggcgaatccagttccagaaattatgccagaattggcaaaagcagcgggcgcagctgttgttggaacaggtcgttctgacttcccgaaccaagtaaataatgtactggcgttccctggtattttccgcggtgcacttgacgtacatgcgacacaaattaacgaagaaatgaagatggcagctgtacaggctattgctgagcttgtagcagaagatgagttaaatgcagactatatcattccggcaccatttgacgcgcgtgtagcgcctcaagtagcggcttacgttgcaaaagcagcaatggagacaggagtagctcgccgtcaagtagatccaaatgagatcgctgaaaaaacaaaacaattagcgctgattggtaaagaataagcgaggaaattccattgacatcatcaaatacaaaagtatatctcgaaattgtaaaaaaaatccgttccattatggaagaggatggattggtggcgggggatcgtttgccgtctgagcgtgagttaagttcacgcttaaacgtaggacgttcctctgtaagagaagcattgcgtgctttagaactggtaggattgattgaaacgagacgtggtgaagggacgtttattcgaaacttttatgataacggtcttgtacaattaattgctccgttcttattgcaagatgagaaaacaattcgtgatttattacaaacgaaacgattactcgagaaagatatgattcgaattgtatgtaatttaccgaaagaaacgttttctaaagtgctaagtaaattacaccaagtacttgaaggaaatgaaaactcaatcccaacgcttcatcaaacgttctttaaaacacttattgaacaagtcgataattatttactatatcgcatttggatgatcgtaaatgattacgtatcaacgctttcttgtaaagtttcaagagattctatcgatatgtatagaaagctttacgctactttggaagaaaaacaagaaaatgatgcactaaaaatttacgatgaattagtagagaatatacagtttcactcgtaatgtataaaatttgtcgaaatgaccatgacacgttatgacaaacattctaccgcgtagcggttaaagttaaacgtaaagagtgaggttattagacagattgagaagataaggctaacatcaaactttggtgttagccccattttcttcttacgctaaccttagctctcaacgaagggggtcaaattgtgctaagagatttattcgtgaaaaagaaaaagtacgctgcaataccttcagaacaagtacgaaaagatgtgccagatggcgttatgacaaaatgtccggaatgtaaaaaaatcatgtatacgaaagaacttctaaaaaatttaaaagtatgtgtgaattgtggatatcatcatcctatgaatgcatgggaacgtcttgatagtatattggacgaagggtcattccgtgagtatgacaaagaaatggtttcattaaatccactcgagtttccaggttatgaagagaaactagagagcgatcgtaagaagactgaattgaacgaagcggttgtaactggtgaaggaacaattgatgacatgcttgttgttgttgcagtaatggattctcgttttcgaatggggagcatgggctctgtagtaggagaaaaaatcgcccgtgcggttgaaaaggcgtacgacttacaagttccatttattatctttactgcttcgggtggtgcccgtatgcaagaaggtatattaagtttaatgcaaatggcaaaaacaagcgtagctttgaaaaagcatagtaatgcaggaggattatttatttctgttatgactcacccaacgacgggcggggtttcagcgagtttcgcttcacttggtgattataatcttgcagaaccaggtgcacttatcggatttgctggtagacgtgtaattgaacaaacggtgcgtgagaaactaccggaagatttccaaacggcagaattcttactagatcatggtcaattagatgcggtggtgcatcgtgatgatatgagagaatcgcttcgtaagattttagaagttcatcaaggaggggaagtggctgtatggcagagctagaatttgaaaaaccagttgttgagctaagaaataagattcgtgaactgaaagactatacgaaaaacagccagatggacttcagtgaggagattcgtattttggaagaaaagctagaaaatttagaggaagatatatacggcaatctaaaagtatgggaccgtgttcaaattgctcgtcatgcagaacgaccgacaacgctcgattatattgagcacttatttactgattttttcgaatgtcatggagatcgtctatttggcgatgatgcagcgattgtcggcggcattgcgaaatataaagggatgcctgtaactgtaattgggcatcagcgcggaaaagatacgaaagaaaatattcgccgtaactttggaatgcctcatccagaaggatatcgaaaagcactgcgtctcatgaaacaagcggaaaagtttaatcgtcctattatttgtttcatcgatacgaagggagcttatcctggtaaagcagctgaagaacgtggacaaagtgaagctattgcccgcaacctatttgagatggcaggtttaacggtaccagttatttgtatcgttatcggtgaaggcggtagtggtggtgcgctaggccttggagtaggagattacattcatatgctagaaaattccacttattctgttattacaccagagggtgcagcggcaattctttggaaagatgcaggaaaagcaaaggaagctgcagaggcaatgaaaattacagcagcagatttgaaagaattaggtgtaattgatgaaattattccagagacaaaaggtggagctcaccgtaatattttgaaacagtcagaaaatatagacttaataattagaaaaacttttgaacaattaaacggaatttcgaaagatgaattaatcgaaaaacgttatgaaaaatatatgaaaattgggcaagtttcgttttcaaacgcttccattgggataaaataagaaaagcgtgcgttcctcttcgcgaatgcacgtttttattatgaaaagacacatcttctccattgtgtttttatattttttcgtgttattttattataaggcaaataatctttatgaggtgagtacaaatgaaacgtattggtgtattaacaagtggtggagattcacctggtatgaatgctgccattcgtgcagttgttcgtaaagcgattttccatgatattgaagtatatggtatttaccatggatacgctggattaatttctggtcacattgaaaaattagaacttggttctgttggcgatattatccaccgcggtggtacgaaattatatacagcaagatgtcctgagtttaaagacccagaagtacgactaaaaggtatcgagcaattaaagaaacatggtatcgaaggacttgttgttattggtggagatggttcttaccaaggcgctaaaaaattaactgaacaaggattcccatgtgttggtgtaccaggtacaatcgacaatgatatccctggaacagacttcacaattggtttcgatacagctttaaacactgttattgatgcaattgataaaatccgtgatacagctacatctcatgaacgtacatatgttatcgaagtaatgggacgtcatgctggagatatcgcattatgggctggtttagctgatggtgcagaaacaatcttaattccagaagaagagtatgacatggatgatgtaatcgctcgtctaaaacgtggtagcgaacgtggtaaaaaacacagtattatcattgtagctgaaggtgttggaagtgcaattgacatcggtaagcacattgaagaagcaacaaactttgatactcgtgtaactgtattaggtcacgtacaacgtggtggatcaccaagtgcacaagaccgtgtattagcaagtcgtcttggtgcaagagcagttgagttgttaattgctggtaaaggtggacgttgtgtaggtattcaagataataaacttgttgatcatgacattatcgaagcgttagctcaaaagcatacaatcgataaagatatgtatcaattatctaaagaattatccatctaatcggcgtaatgtcagatatttgggaacggtttcataattttcggaggtgcaatatgcgtaaaactaaaattgtatgtactataggtcctgctagtgaaagtattgaaaaattagagcaattaatcgaagcaggtatgaacgttgctcgtttaaacttctctcatggtagccatgaagagcacggagctcgtattaaaaacattcgtgaagcttcaaagaaaactggtaaaacagttggtatcttacttgatacaaaaggtccagaaatccgtactcacgacttcgtagacggacaagctgagcttgtaacaggtgcagaggtagttctttctactgagcaagtattaggtactgcagagaagttctctgtatcttatgctggtctttatgacgatgtagacccaggttctcgtattctaatcgatgacggtcttatcgaactagaagtaatcgaaaaagctgatggaaacatccgtacaaaagttcttaacagcggaactgtaaaaaataaaaaaggtgttaacgtaccaaacgtaagcattaagcttcctggtatcactgaaaaagacgtaaaagatatcatcttcggtatcgagcaaaaagttgatttcattgcagcttcattcgtacgtaaagcgtctgacgtattagaaatccgtgaattattagaagagcataacgctcaatacatccaaatcgtaccaaaaatcgaaaaccaagaaggtatcgacaacatcgattcaatcttagaagtttctgacggtttaatggtagctcgtggtgatatgggtgtagaaattccaccagaagaagtaccgttagtacaaaaacgtctaattaaaaaatgtaacgtgttaggtaaaccggttattactgcaacacaaatgttagattctatgcaacgtaacccacgtccaactcgtgcggaagcaagtgacgtagctaacgcaatcttcgatggtacagatgcaatcatgctttcaggtgaaacagctgctggacaatatccggtagaagcagtaacaatgatggctaacattgcggtacgtgttgaaaaatcattacaatatgaagatatgttcaaaaaacgtattaaagagttcactccaacaattacagatgcaattagccaatctgttgcgcatacagcacttgctcttgatgtagctgcaatcgtagctccaacagaaagtggatatactgcgaaaatgatctctaaataccgtccaaaatctccaatcgtagctgtaacatctgacgagcaagtaggacgtcgtcttgcacttgtttggggtgtacaagcatttatggctgagaagcgcgcagcttcaactgacgaaatgttagatacagcaattcaaacaggcatggatgcgggtctaattggacttggagatactgtagtgattactgcgggtgtaccagttgctgaaactggtacaacaaacttaatgaaaatccacgttgttggtgaagaaattgctaaaggacaaggaattggtcgtaaagctgcaaaaggtaaagtagttgtagcaaaaacagctgctgaagctgtagcgaacgtaaacgaaggtgatatccttgttacaacaagcactgataaagatatgattcctgcaatcgaaaaagctgcggctttagttgtagaagaaggtggcttaacaagccatgcagctgttgtaggcgtatcaatcggtattcctgttatcgttggtgtaaactgcgtaacagcaactttaaaaaatggccaagaagtaacagttgatgcagcacgcggaattgtttataatggacatgcggaagtgctataagtaatacggagagaaggatcggagtccttctcttttttttacacaaaaacgagatagaattagcttaaagcgcctagaattgcttttaaaagctgtttgttatgtgttttaatatgaaagagtatctatatttcatatgatgtatataggcgttgtgaggacgttaaaagtgagttgtgagagaggtgtagaactatgaagtggttactattcttgtttattttaataccggcgattgagattacggtcttaattggatcaagtcatgtaataggtttatggtctacgttcgctatgattgtatttacaggtgttgtaggtgtgtatttggcgaaaagacaagggtttaaagtgcttggagagattcaatctaagttgaatagaggggaaatgccaggtgaggcggtactagatggtatttttgtatttgtaggaggtattctcttagtgcttcctgggtatgtgacagatgtgctagggtttatctgcgtgatccctattacgagagctttattgaagccgtttgttatgaagtggatggaatggaaatttagaaagaactctactattattattcagaaatagcacttagattgtagaaatctaagtgctattttttgtgttgtaagaggagaggaactttctggttgaagctttgctttgccgcgctatttgtggggtggaatttctatctcaaagctgggctgctcgtaagtgtctggtgtggggcgaatgatgagtggggatgaacaaaacgttcgcttattatatgtgctatataattttcgtttgaattcttgtgtgtacttcgattaaacttgtgattttttagtgctattaatttagatgaataagatggagggaacgctgctgaattaaatttttgctttctcatataaaggaacgattggtgtaaaaaattcatataaaaaggcggagattgttagttgaagtcttgttttatgctattttgtatatttattcatttacataaaaagtaataaatgtaaatgataattataaaataaatagaataaatatgtaaaaacaccacgaaatatgcgtttttcatgcaaaaaaacaagagaattatcttttttgagtgcaattctcttgttttatgtaatgagtatgaaaaataagtacaaggaataatcagtgggaaattcccactgattacatgtaagttttttgttgtgtatgaattagaaactattattttgaaggtgaacctttaatatatttccacaagtcatggaagacattagctttgtgtaatgtattaagtagtactaaggtgactgggccgatgattaatcctaaaaagccaaaaagtttaaagccgacaaatagagcgacgagtgttgctaatggatcgagaccgatgttagatgaaagtactttcggctccataatttgtctttggacaatcacgacgatgtataaaatgagaagaccaatggcgaatgcggtatcgccagtgaaaaatacgtatataacccatggaacgaagactgcgcctgttcctaagtatggtagtaaatctacaactcctgtaataatcgcaatagtaatggcgtatggtacgcgtaatattaaaagtccgattagtacaatgacggttgtcatagatacgagtgtaagttgtgctttcacaaaaccaaacaaagcttttcttaagtcgacaaaaatagtttttccatagccatgtacacgattcggtagcaattttcttgctttctgagcaagacggtgccaatcgtaactaatgaagaaagtggctaataaaatgaatacaagaacagttaaagttgttggcagtgcactaatgaaattcgttaacccgcttataatggcggttaaaagttctttcatttgtgttgttgcttctgttcctaagttttgaatgttttgtgtaattgtatagcgctgtggttctccaagatgattaaatttagagattaaatcatcgtagagaggcataatatgattaagtgcaaattgctgagcgaatgtaacgatatctggaaactttactgtaacaagttgtagtaagtatgttgtggcagatattgcttcagtcacaagatatgtaacaagtccaacgatagctccaaatacgagaattaagctaacgagtactgctagtgcgcgaggaaattgtagtttttgattaaggaaattgacgacaggattaatcaaataagcaaatgcaaaagcgataataaaaggatagataagccctgacatgtatagtaatacatagaacccagctaccgttgctacaatgacaaatatgagtcgcaatatcatatatagtaagtttcggttcaaagatgtatacctcccattccaatttggattatcctaattcgttcaacttataacgagtgtgctccactgattaaagtttcactttaccccgcattaacgggcagtaaatctcctacccgaagtgcggctggatcaaaggagttagctggagataaactgcccgtaaaagcccgattggtgaaggctaataatcagtggaaaatgccccactgattaaagtttcactttatgttatagtggaatgatggatttttcctgctttttcagtatatgagtgactgtgaaagcttggtgttgatgcttctactatatggtaaaaacttcattttctcttctttttattttacctgtttctaattagaaaagaaagaagagacgcccgttttttaaaatgtatacatgcttaaattttgatggtgaaagtctcagtttgtcattttaaaatacataaaaaatgaagtaattcatgttgaataggcatcgatatagcatgtataacgataggtttaaaggtatttttgtttggaaatgagttcattattttcagaaaggaagtgcaaacatgattagtcagtcaacgttatttttattcatactacttattataggacttattgctaaaaaccaatcgcttactgtagctattggtgtgttatttttattgaagtttacgtttttaggagataaggtctttccttatttacaaacgaaaggaattaacctaggtgtaacggtcattacaatagcggtgctcgtaccgattgcgacaggggaaataggttttaaacaacttggagaagcggcgaaatcttattatgcgtggattgctttagcttcaggtgtagcggtcgctttgttagcgaaaggcggcgtacaattgttgacgacggatcctcacattacaactgcgcttgtttttgggacaattatagcggttgcgctatttaatggggttgctgttggtccgttaattggggctggaattgcctatgcggttatgagtattatacagatgtttaaataaggaattttatagtaatataaaatttttgaattctttctgttcacaaaagtcagataattgtttataataggattagaaactttgaaaagttacataacagcagagactttacaccagataaaataaaaacaacataaaacaattttataatgatattgttttatgttgtttttatcataaaactcttcggaatgtattttcctcactaacttgttgttttgagcgtgaggattcggggagacattcacgctcatgctttccatgtaaacaatggacaataagaggggaacatcgcaacaaatttgcatgatcgtgcattttgcttgcctaaagagtgaacgggcgttcataattcataaggggagcaaatagatataaggagcaagattgggagaattttcaggaaaaggagagaatgtcatgactgttattcgaggtttagaaggggtagtagcaacaacatcatctgtgagctctattattgatgatacattaacttatgttgggtataatattgatgatttagctgagaatgctacgtttgaagaagtagtgtacttattatggcaccgcaagcttcctaatgaaaaagaactagcggaatttaatgaaattgtatctgaatactataaagttccaggtgagattttaacatatttgaaacaagtagatttaaaaattgcacatccgatgtctgttttacgaactgcaatttccatgctatcattatacgatgagagcgctgaaattatggatgaaaagtccaattatttgaaagcggttaaattacaggcgcaagtcggaactttagttgctgcttacgcgagaatccgtaaaggtttagatgttgttgagccaagaaaggatttatcattagctgcaaacttcttgtacatgttaaatgatcgcgagccaaatgaagttgaaattgaagcttttgataaggcgcttgtacttcatgcagatcatgagttaaacgcttctacatttactgcacgtgtttgcgtagctacactttcagatgtatattctggtattacagcagcaatcggtgcattaaaaggtcctcttcacggtggggcaaatgaaaatgtaatgaagatgttaactgagattggtgaagaagaaaatgtagagtcatatattcataatgctcttcaaaataaagtgaaaatcatgggctttggccaccgtgtgtatgagcagggtgatccacgtgcaaaacacttacgtgaaatgtctaagagattatgcgtgcttttaggagaagagaaatggtataatatgtctatcaaaattgaagacattgtaacaaaagaaaaaggtcttccaccaaatgttgatttctattcagcttctgtataccattgtttaggaattgaccatgacttatttacacctatttttgcaattagccgtatgtcaggctggttagctcatattctagaacaatatgaaaacaaccgtttaattcgtccgcgtgctgattataatggaccaacgcatcaagtgtatgttccaattgcacaacgataagcgaataacactattttgatagtgaaaatacgctttcaaaagtctgattttttcggaaagatgtaatgattagaatattttaatttgactaacggtttgaactgaggggttattccctcagtttcatacatatgaaatttcaaacatgggggttatcacattgacgacaggtgaaaaaattactgtaactaatggtgttatgaatgtaccaaacaatccgattattccatttatcgagggagatggaattggtcctgatatttgggcggctgcatctcgcgtactagaagcagcagttgaaaaagcttatgatggtgagaagaaaatcgtttggaaagaagtgcttgcaggggaaaaagcattcaaccaaacaggcgagtggttaccagaagaaactttaaacttaattcgtgaatatttaatcgcgattaaaggtccacttacaactccagttggcggtggtattcgttctctaaacgtagcacttcgtcaagaattagatttatatgtatgtctacgtccagttcgttattttgaaggtgttccttcacctgtaaaacgtccggaagatactgatatggttattttccgtgaaaatacagaagacatttatgctggaattgaatatgcacaaggatctccagaagcagaaaaagttcttgctttcttaaaagaagcaatgggtgttaataaaatccgcttcccagaaacatctggtattggtattaagccgatttcagaagaagggacaaagcgtcttgttcgtgctgcaattcaatatgcaattaacgaaaaacgctcttctgttacattagttcataaaggaaacattatgaaatttacagaaggtgctttcaaaaactggggttacgaagtagcggaacaagaattcggcgacaaagtatttacttgggctgaatacgatcgtatcgttgaaaaagatggtaaagatgcagcgaataaagcgatggcagacgctgaagtggctggaaaaatcatcgtaaaagattctattgcagacatcttcttacaacaaattttaactcgtccacgtgagttcgatgttgttgcaacaatgaacttaaatggtgactatatctctgatgcacttgctgcacaagtaggtggaattggtattgcacctggtgcaaacattaactatgtgactggacatgctatctttgaagctacacacggtacagctccaaaatatgcaggtttagataaagtaaacccatcttctgttcttctttcaggtgtattattattagaacacttaggatggaacgaagctgcgaaattagtaactgcttctgttgagaaaacaattgcttcaaaagtagtaacttatgatttcgcacgcttaatggaaggtgcaacagaagtgaaatgttctgagttcgctaatgaacttattaaaaacatggatgtagcgataatcaaaaacgcataattaaagcgggggggtaaattatgacaatcaaacgcaagaaggtttcagtcatcggtgcaggatttacaggagcaacaacggcattcttattagcacaaaaagaactggcagatgttgtattagtggacattccacaactggaaaatccaacaaaagggaaagcgttagatatgttagaagcgagcccagtacaaggttttgatgctaacattattggaacatctgattacgcagatactgctgattctgacgttgtcgttattacagcaggtattgcacgtaagcctggtatgagccgtgatgacttagtagcaacaaactctaaaattatgaaaagtattacgcgcgacattgcaaaacattcaccaaatgcaattattgttgtgttaacaaatccagttgatgcaatgacatattctgtatttaaagaagcaggattcccgaaagagcgtgttatcggtcaatcgggtgtattagatacagctcgtttccgtacattcatcgcacaagaattaaatctttctgtaaaagatattacaggatttgttcttggtggacacggtgacgacatggtacctcttgtgcgttattcatatgcaggcggtattccgttagaaacgttaattccgaaagagcgtttagaagcaatcgtagaacgtacacgtaaaggtggcggtgagattgtaggcttattaggaaacggtagtgcatattacgcaccagcagcttctttagttgaaatgacagaagcaatcttaaaagatcaacgccgtgtattaccggctattgcgtaccttgaaggtgagtatggttatagtgacctttacttaggggtaccagtaattctaggtggtaacggaattgaaaaaattattgaattagaacttcttgcagatgaaaaagaagcgttagatcgctctgtagaatctgtacgtaacgtaatgaaagttcttgtttaataattgaatagtagtgaaaaagattcgggattccgaatctttttctactatttaccgaattgtttttttgaaataatatgaaaacgctatcatttgtaatatcctataatgaaactgtagatttatactatacattgccctcatcatagtaaatttcggataaggtatcgcttttagtaggataataaggtgaaaaaatcggagggggttgtaacatgttaaagaaaaaagttcaaattggtcgtaaaatggatgaaattacagtaggagagaaattatctatcactgaaaaaattgaggataaagatttgttattgtacttagggttaacgaatgatgccaatccattatatattcagcatgattacgcatcccaaactccgtatgaaaagccgattgtaccaagcattatgctaacgggaatgattacaacggcggttacgaaatatttaccgggtccaggaagtcatattacgagaaaggaccttacattcgtgaaacatgttcaccattatgaaacgttacaaatccactttgaagttgtggctgtttctgaggaggaacatacaattgatatgcttgtatctgctcatgatgaaaaaggagaaactgttgtaaagggttcattaacagtaacgccaccttataaatctgtttccattatggaaaaagcattagataacttttaaaagatgaaaataaaaatagcgctagcatacctttaataaggatgctagcgctatttttagttgaaaaacccttctttgaacccttcagcaaattctgagcaacccgttttaatcgtatcccagctaggagcgttaaaagcaaggatacatgtgattgctaaagatagaatggatagtattagtcgcataatagacctccgaatattattaatttatatattaagattaataatattattatcggtaattgaagtcaattaaaggagtgattttttaggtgaggtggaaaagagaagacgcgatctttgaaacggtaagagaagctgaagtgtgggcagacgggtttgtgaatgaaatgtacgggagagtatttgatggatatgaaacaccagattataaaatagcgtatgctttatcttttctcttagcgcaaaatcgagaactcaatattcatacggaagtagaatttaataacgatatggaagtatataaagtatggataacaaaacataattgaggcgaacgtaattgtttttaggaataacaatagcacaatccgaatccatgaatagacaattatattgagagggaccttgttttctagtatgatgagaataacggggaaaatactaggatgaagaaggtttcaagtctataacttggaggaaaagaatgaacaatcgtattttagtagttgatgatgaggaatttatcttaactttaatcgaatttaatttacaacaagctgggtttgaagttataacagcgatggatggagaaatggcgcttcaaaaagcgacaacagaacgcccagatttaattatattagatttaatgcttccgaaaatggatggtatggaagtgtgtaaagaattacgattgcagcgcgttatgacgccgattttaatgttaacggcaaaagatgatgagtttgataaggtgctaggccttgaacttggggcagatgattatatgacaaagccatttagtccaagagaagtagttgctcgtgtgaaggcgattttgcgccgtacgaaattacaacaagaagaacaagttgcagaagcgccagatgaagatagcatcacaattgcagaacttaaaattttaccggagttttatgaggcttatttccaaggaagaaagcttgaattaacaccaaaagaatttgaactacttgtgtatcttgcgaaaaataaaagtcgcgtgttgacacgtgatcaattattaagtgctgtatggaattatgattttgctggtgatacacgaattgttgatgttcatattagccatttgcgcgataaaattgaacaaaatacgaaaaaaccgacgtacattaaaacgatacgtggtttaggatataaattagaggagccaaaagggaatgaataaatttcgttccaggcttctttttacatttgtttctcttattgtatttattttagttggactaggtttattactagaaactgtgtttgaaaactactatatagatcatgctaaagagagaatggtaaaagagacggagtatgttgcgacgttagcagaagagcaaggttttgataatgtcttaaaaaatccatacgtatttgaaaagttagaagaaaaaataccagcttctatcgtatttttggatgaaaaaaagaaagttcaatatagaaaaggacaagaattggcatttagtccagagacgattaaagaactttcttcggaagtggcaaaacaacgaagtaaagtaattacgaaagaaacggatcgaaagaatgaattttatcatgcggtgttcgttcaagatgtagaaggaaaacaaggatacattttggtgaaaagtataattgatcctttaagagacgtacatcaaaaaacgtggggattattaattatcggatttgtcattgcttgtctcgtagttgtatttttaggtatgaaaattacagggcaatatattaggccaattgaatcggttacgaaagttgcaattgaattggcaaagggtaattataaagcacgtgcatacgaaagtcattcggatgaaacaggaatgctgagtaaagcgattaatattttagcacgaaatttacaagagatgacacttgaacaagaaatgcagcaagatcgtctgcatacgttaattgaaaatatgggaagcggaatgattttaattgatagccgaggatatataaaccttgtaaaccgctcttataaggaaactttccacgtaacagatgaagaatatttagatcgcttatattatgaatcgtttcatcatacagaaattattgagcttgtagaagaaatctttatgacagaagtgaaagtgcgtaaacaaatgttattaccacttggaattgaacggaagcatttcgaagtatatggagcgcctattatcgggacaaaccatgaatggaaagggattgttctcgtattccatgacataacagagttaaagaaattagaacaaatgagaaaagactttttagcgaatgtttctcatgaattaaagacaccgattacttctattaaaggtttttcagaaacactcttagacggagcgatggataataaaaaattctgcgaacatttcttgcacattattttaaaagaaagtgagcgcatgcaaggattaattgaagatttattagatttgtcgaagatcgaacaacaaggatttaaattaaatatgggaaccgttgacatgaaggggctgcttgaagatattcatatggtgcttgataataaagcaggagaaaaagaaatctctttacaagtgaatgtattaaaacgtgcctctgttattggagatccaagtcgtttgaaacaaatctttattaatttaattaataacgcaatcgtatatacaccggctggaggcgttgtttcagtagagttagcggaagataaatataatgcttatataaaagtatcggatactggaattggtattagtaaagaggaaattccgcgtatttttgaacgtttctaccgggtggataaagcaagaagtagaaatactggtggtaccggccttggattgtcgatcgtaaagcatttagttgaggcgcatcaaggtacgattacagtagatagtgaagttggagaaggaacaacgtttacagttgttttaccgaaatcagcaactgaaaaataggatgaaggatgtttacaatatattaacaatggcttaattaaatattaataaagctctgttaatataatacatgaaaaccccttcatccaaggagtaattttggacgagaatagttaagctgttctcgtcacttccctttatgccaatataagtctgttttatatatgaaagaaaatagccgttatttttcttctctctattagtcatgttaatatagagagaggaaaggaacggtttttttctgtgaaaaaaatcatttcaaatttgtatggggaggtttcaattttggaaaaaaaggtcgtattagtagatggtaataatatcgcgtatcgtgcattctttgcactaccgcttttaaataacgacaaaggtatacatacgaacgcaatttacggttttacaatgatgttaatgagaatattagaggaagaaaagccaactcatatgttagtggcgtttgatgcaggcaaaacaacgttccgtcataaaacgtatagtgagtataaaggagggcgtcaaaagactccacctgaattatcagagcagttcccgtttattcgtgagatgctggatgcgttcaatgtaccgcgttatgaattagaaaattatgaagcggatgacatcatgggaacgttagcgaaagaagcgagtgagcaaggggcaagtgtaaaagttatttcaggagataaagatttacttcaacttgtttctgataacacgcttgtatgtattccgcgaaaagggattacagaagtggatgaatatacgaaagaagctttatttgaaaaatacagcttatcaccaaagcaaattatcgatatgaaaggtttaatgggagaccagtcagataatataccgggtgtaccaggagttggtgaaaaaacggcaattaaattgttaacacagtttggaacggttgaagcggtgtatgaaaatatagatcaagtaagtgggaagaaattaaaagaaaaactggaagaaaataaagaacaagctcttatgagtaaggatcttgcaactattattacagatgcgccgattacagttcgtgtggatgatatggcgtataaaggatatgaagcaagtgatgtcattccaatgttcgagagtttaggatttacatcccttttaaataaattaggcgttacgccagaagaaactgctccagctgaattagatgatattacatttgatattgtggaagaagttacagaagaaatgcttcagcaagatagtgcgcttatcgttgaagtacaagaagataactatcataaagcagacattcaaggtttcggtattcaaaatgaaaatggatgttactttattcagacagacattgctcttaagtcagatgcttttaaagagtggcttgcagatggagaaatgagaaagcatacatttgatgcgaagcgtgcaatcgttgcactgaaatggaatgggatagatatgcaagggattgactttgatctattaatcgctgcttatttacttgatccagctgatacggataaagacttccgtactgtagcgaaaatgaaagaaacgcatgctgtgaaatctgatgaagaagtttacggaaaaggtgcgaagcgtgctgttccaaagttagaggtagtagcggagcatgtggctcgtaaagtgcatgtattatatgatgtaaagcaaacattcgttgaagagttaaagaagaatgagcaatatgaactgtttacagagttagaattgccgcttgcacgtgtattagctgatatggaagtaaagggtgtaaaagttgatacagagcgtcttcgtaatatgggagaagaacttgcgggtagattaaaggaaatggaacaggaaatttataagcttgcgggaacagaatttaatattaattcaccgaagcagcttggtgttattctgtttgagaacttaaacttgccggttattaaaaagacgaaaacaggttattctacgtcagctgatgtactagataagcttatgaatcaccatgaaattattccaaatattttacattatcgtcaattagggaaactaaattcaacttacattgaaggtttgctgaaagttgtacatgaagattcatctaaaattcatactcgctttaatcaagtgttaacgcaaacaggtcgattaagttcaacggatccgaacttgcaaaatatcccaattcgattagaagaaggaagaaagattcgtcaggcatttgttccgtcagaagaaggatggattatgtatgcggctgattactcacaaatcgaactgcgtgtattagctcatattgcaaatgataaagggctagttgaagcattccaacatgatatggatattcatacgaaaacagctatggatgtatttggcgttaaaaaagatgaagtaacttcaaatatgagacgacaagcgaaagctgttaatttcggaattgtatatggtattagtgattatggtctttcacaaaacttaggaattacaagaaaagcagcagcggaatttattgaaaagtatttagaaagtttccctggtgtacaagaatacatggaggacatcgtaaaagatgcgaaacaaaaaggatatgtggctacattattaaatcgtcgccgttatattccagaaattacgagtcgtaatttcaatttacgtagcttcgctgagcgtacagcgatgaatacaccaattcaaggtactgccgcagatattattaaaaaagcgatgattattatggcggatcgtttagaagaagaaggattacaagcacgtcttcttctgcaagtacacgatgaattgatatttgaagcgccaaaagaagaaattgaaaaattagagaagcttgtacctgaagtaatggagcatgcaattgaacttgcagttccgctgaaagttgattattcttacggtccaacttggtacgacgcaaaataaggaagtgatgaaatgcctgaattaccagaggttgaaaacgtcagacggacacttgaaaatcttgtaacaggaaaaacgattgaagatgttattgttacttatccaaaaatagtgaaacgaccggatgatgcagaaatctttaaagaaatgctaaaaggcgagaagattgaaaatataaagcgaagaggaaagtttttgcttttatatgtaacgaattatgttattgtttcacatttgcgtatggaaggtaagtttttactacatcaagaggatgagccgattgataaacatacgcacgtccgtttcttatttacagatggaacggaattacattataaagatgtgagaaagtttggtacgatgcatctctttaagaaaggtgaagaaatgaaccaaatgcctcttgcggacttaggtccggagccatttgatcctgaaatgacaccgcagtatttacaagaaagattacaaaagacaaatcgtaaaataaaagttgtgctactggatcagcgtcttttagtagggcttggaaatatatatgtagatgaagttttattccgttctcaaattcatccggaacgagaagcttcgtctttaacagtagaagaaattgagcgaatttatgaggctaccgttacaacgctaggcgaagcagtaaagcgtggcggaagtacaattcggacgtatatcaactcacaagggcaaattggttcgttccaagaactcctaaatgtatatgggaaaaaaggagagccgtgcgtaacttgtggcacgatattagaaaaaacagttgttggcgggcgaggaacgcattactgcccaatttgtcagcctagaatatagaaaagagataacatcggataggcatttgtcatatacatacagcagagctatgtataagggaggagcttaccgatgtacctttatttatctcttattttattagcttttacattaagcttggatagctgtagtgtagggctaacatatggtttaagaagcgtaagaattccactaagatcaattataattatcggaatgtgttcagcggctgttatgcttgtttcaatgggaattggacatatgatcgcgaaagtattttcacctgttatcgcaacgcgtatcggtgggcttgttcttattggaatagggatttgggtattatatcaattttttcgaagtgagaaaaaagaagaaccgaagcaagaggagaaggtctggaaattagagattgcctcgctagggctagtgattcaaattttacggaaaccgactgtagcagattttgataaatcaggaaccatttctgcaggagaagcattgcttcttggtatcgctctttctgtagactcatttggtgccggaattggtgcatctttattagggtatgtacccgctatgatggcgatattagttgcaattatgagttctttgtttttatttattggaatgaaacttggaacggttttatcgaatatgaagtggttacaaaaatttacattcctgcctggagtattactcattattattggaatttggaaaatgtaagtatgggcgtggaacattagtttcgcgccttttattatgaggaggattatgatgacagtagtaattggattaacaggaggcattgcaagtggaaaaagtacagtgtctcaaatgtttcgtgaactgagcataccagttattgatgcagatattattgcacgagaagttgtagagcgaggaaaaccagcatataacaaaatagtagaagtatttggaacggaagtgttacaagaagatggagaactagatcgtccaaaactaggaagtgtcgttttctataatgaagaaaaacgattggagttaaataaaattgttcatcctgcagtgcgtgaggaaatgaataggcaaaaggaaatgtacataaaagaaggtatgcaagcggttgtgttagatattcctctcttatttgaaagcaaattaacaagtctcgttgaccgaattttagttgtagcggttaagccgcatacgcaattagaacgtttaatgaaacgaaataacttttcagaagaagaagcaacagctcgtattcaatctcaaatgccgttagaagaaaaagtgaaaaatgcagatgaagtgataaataatgatggcacaattatgggaacgaaaacacaattgcaggtaattttaaagaagtggaacattattgactaaaaaattgtgaaattaatgaaaatgcttagtgacatatcccctttttgtgttatactattattgggattggagataaatagtataacgcattcaagggggataacatattatgactcgtgtggcaattaatggatttggacgtattgggagaatggtatttcgtcaagcaataaaagaaagcgcattcgaaattgtagcaatcaatgcaagctatccatctgaaacgttagcacacttaattaaatatgatacagttcatggcaagtttgacggaacagtagaagcatttgaagatcacttattagttgatgggaaaatgattcgccttttaaacaaccgcgatccaaaggaattgccttggacagatttaggtgttgaagttgtaattgaagcaactggtaaatttaattcaaaagaaaaagcaattcttcacgttgaagctggagcgaaaaaagtaattttaacagcgcctggtaaaaatgaagatgtaacaattgtagttggtgtgaacgaagaccaattagatattacaaaacatactgttatttcaaatgcatcttgtacaacaaactgtttagcgcctgttgtgaaggtgttagatgagcagtttggaattgaaaacggtttaatgacgacagttcacgcctatacaaatgaccaaaaaaatattgataacccacataaagatttaagaagagcacgtgcttgcggacaatcaatcattccgacaacgacaggtgctgcgaaagcgctagcaaaagttcttccacatttaaacggaaaacttcatggtatggcacttcgtgtaccaacaccaaacgtgtctcttgttgatttagtagtagatgtaaaacgcgatgtgacagttgaagccattaacgatgcattcaaaactgttgcaaacggtgcgttaaaaggtattgtagaattcagcgaagagcctttagtatctatcgactttaatacaaatacacactcagctattattgatggtttatctacaatggtaatgggtgatcgtaaagtgaaagtacttgcttggtatgataacgagtggggctactctcgtcgtgttgtagatcttgtaacgttagttgttgaagagttagcgaaacaagaaaatgtgcaacacatttaagtgaataagggaggagagggcaaggcaacatttgccctctttttttaattttttctgaaaaggaaaaaaattatataagtatatttaaaaaagtggacataccacgaagcgttgtgattactgcatttgtgaatcgtttattttttttagggaaaagtaaagaggaaaatatgacagaaaatcgaaaaaactgttgttgcaaaatgaaaataaacaaagtatactaacactcgtaaacttaagagctgaggtacgtagtcactacttaaagggttaggacctctctggactaactttcccccgtggtagtggagcaagccaaattgcaaattagttttcaattcgaacagttagaataaatttacaagggggaactgtagaatggatactatggatacgatgggtcgtcacgtgattgctgaactttgggattgcgatttcgacaaactgaatgacatgccgtatattgaacaattatttgtggatgcagcactaaaagctggtgctgaagtgcgtgaggttgctttccataaatttgcaccacaaggtgtaagtggagtagtaattatctcggaatcacatttaacaattcatagctttccggagcacggttacgcaagtattgatgtttatacttgtggggatcgtattgatccaaatgttgctgcagaatatattgcagaaggtttaaacgcgaaaacgcgtgagagcatcgagcttcctcgaggaactggtagcttcgaaattaagcagagagaaacaaaagctctttaaaaaagaacataattgatttaaaatgtaaagaggtgtataatgcacctcttttttagtttataaaaaaggaaaaatataacgtactcgttagttgaataaattggattcttgcaaatgaggtagtgctctatataccatcttatttttaaggatgagatgataaagtgatgcgctgaaacttaaagtggtaagagagttagaatgagttatataatattgtatatatattttaggtgaagtgagtagagaaaaataaagagtatagtgtaaaggagtgaatgtattgcgttgtccatcctgttctcataatggtacaagagtgttagattcgcgtccggtagacgaggggcgctctattcgaagaaggagagagtgtgaaagctgcttaagtcgctttacgacctttgaaagggtagaagagtcacctcttatcgttgtaaaaaaagaaggcacacgagaagagtttaataaagaaaagattttacgtggtttaattaaagcgtgtgaaaaaagaccagtatctttaagacaattagaagaagtaacacaaagcgtggaacgtgaactgcgtaatttaggtatatcagaagtgaaaagtgatatgattggtgaaattgtcatggaagaacttcgcgatattgatgatgttgcttacgtacgttttgcttctgtatatcgtcaatttaaagatttaaatgtatttattgaagaattaaaagatatactgcaaaaagaaagagagtagaagttgtattttattctctttacataccgtaaataataggataagagagctagaagcgcaagctaatagctctttttcactaagaatttatataatgaagatagaacgaatgaagtagaggatagattggatgagagaaaggaaaagcaagaatggaaaaacagtcatggatggagctattgccgattgatcgttataaagtaagtgcgaaagggctactgcacaattacgaccgaaaagtgttaacgatgttgtatcagccgttaataggtagtagagcttttagcttatacatgacactatggggagagctagagcaagatcgtgtatttggaaaagagaatacgcatcattcccttatggtgactatgcaaatgcaacttcctgaaatatatgaggaacgagtaaagttagaggcaattgggctattgaaggtatatattaagaaagaaaaagatattcgaatgttcatatatgagttgcaaccacctttatctccgaagcagttttttgatgatattgttttaagtatctttttatacaatcgattgagccggacaaaatataatcaagtaaagcaatatttcttagaagaagaatttgattttgcttcttatgaaaatgttacgcgttctttcaatgatgtgtttggttcgtttaatccaggacagcttgagcatgcgcaagaagaccttcgtattccaaaaacgacaactatgccaagtaacgagaagggagacgctccgaaagtttggaatgatttctttgatttctctttatttgtagatggattgtccgctcttgttcctaaaaaggcgattacagatcaagtgagagactgcgttataacacttgcttacgtgtatggtgtagatgtgttatcgatgcaaaatatcgttcttggtgcagtgacagagatgcaaacaattgatacggaaaggcttagaaaaggagcgcgcgattggtatcaatttgaaaatggtcaagcattaccggtattaagtgaaagagtacagcctcatgctgcacgtacgatgaaagagaaagagccttcatcgcaagaggagatgttaataaagcagctagaggaaatctcgccaaaacaactattgaaagagatttctggtggtgcagaggcaacgaaagcggacttgcagatcgttgaagatgtcatgattaatcaaaaattgacaccaggagttgtgaatgtacttatttattacgttatgctacgctcagatatgaaacttgcgaaaacgtatgtcgagaagattgctgggcattgggcacgtaaaaaggtcggtacagtagcggacgcgatggcgttagcgaaagaagagaaccgtcaatatcaagagtgggctgagacgaagaaaaaaggccgtacggcgaagaaaacggtgcggaaagaaatggtgccagattggcttaaggaagaagagccgaaagaacaagagaaagaaacagagaagaaagatacaagtgtagaaaaagatgcaagtacgctagaagatgaaagaaaacgactagaagaagtgttaaaaaaatataagcgtgattaatagaagagaatgaacgctctttgaggtgagaaaatggagcatattcaaaattcatttgcaaaattaatggaaaatgaaaactttaaaaatagatatgaagtactaaaggcagaagtaatggcgcatccgcgggtgaaagaatttatagacgaacataagggtgaagtaacgacttctatgattgagcgcagtcttgtgaagttatatgaatatattggacaaagtgtaggttgcgtggattgtccggatttaggttcatgtaaaaatatgctacaaggttatgagccaaagcttgttattcaagggaagatgattgatattcaatacgatcgctgcgttagaaaagtagcgcatgacgagagaaagaaatatgaaaaactcgttcaaagtgtatatatgccaacggatattttgcaggcaactatggaaaacttagacccttctgatttaaatgcacgtatcgatgcaattggtgcagcgaatgaatttttaagtacatatgaaccaggtaaaaaagcacaaggtttatatttgtacggtaaatttggtgtaggaaaaacgtaccttttaggagcaatagcgaacgagcttgctcgaaagaaaataagttcgatgctcgtatacttcccggaatttttacgtgaaattaaaagttcaattcaagataattcgattggtgaaaagattgatgcggttaaacgcgtacaagttttaatgttagacgatatcggggcagaagcgatgtcaagctttgtgcgtgacgatgtgcttggtgcaatcttgcaattccgtatgttagaaaacttaccgacgttctttacgtctaattttgattttaaacaactggaacaccatttaacgtatacgcagcgtggtgaggctgaagaaatgaaagcagcacgtattatggaaagaattaaatatttagcgaaaccagttccaattggtgggaaaaaccgtcgtcataagtaaaagagtaagcttctcagcttgctctttttttgtattatagtgatattttcttttcgaatatgagatcgaaatattcaggttgtccagaactgccaaacgtaggggcaacaatctgtacgaacctccagccatctctagcatgttcttgaataatttcttggtagtcttcagctggttttgagcgagtgaacccccaatgtaattcgacttttacgaatttatattcaaacattcagatacccccttttattgataagtaaagtatacaataaaaattcatagtagcttgtatcatttttttctccctcccttaatatatataaaattagcaagccatattgagtggattttctaacgataggaaatgtgattctactaagagtgaaattcacgcgggacggactcttataggatttgtaacgtatagatacagtcctttagagcggggataaaaggggggacaaaagtgattgaaatttgcttcgaagaaaaaaatgatgctatgcacgtatatagacaattgctgaaaagagcggaagtgttatataaggaaacgagtgtgtatttacaggaacaaaaagtggtgattcacataccagtacgtgaatcgaattatattgaaaaaatcttattgccagtaatggtgtatttcattgtgaatgtgaaacaaaatgagtggatttatacgattttaaaagaaaagtttttttatgaagaacaagaagagtgtcatcaaatattgcacatggcacatgagattttaaagggaagaagaaaaggtgtagctcaggatttaacgcgtaacgcatttgagtcatatattaagtcttctttaaataattggctttgtgatccgctctcattctcgttttcatcatatatccgttttcgtcttcgtacatatagggaaatggtgactaaacttgcggaagtggcaattgatgaatataagatggagcaagaataccaaatgttcattgagacgcttcggcaacaagtaagtagccgtaaatcacgtttgtcttgcgtgcatcttatttttgatgaaagctttatcttttatgatgataaaggtagacgtttaaaacaggagaagttggtccaatatatagatgaggaattattaaagcaaaatgatgtatatattgatacgaaagtaattgcgccgcttctttctatttcgcctaaaaagatttatttatatacgaaagaacaagaccataatatgattattactttgcgaaatgtgttccaagaacgggtccaattacatggattacatgattttgagcgcaatgtgaaaaatttaaaaaataaaggtaacgcccttgattttctaagtttttgagcatataattacctacataaatgaaatatattgaaatgtcatgatgaggacatgagtagttttctacgattttcagagagggaagccttagggtgtgagcttcctagtacgggattattacttaccacctctaaactttagcagtgaacggtttttctagtaattgctaacggacaacaccgttatgttgaacttgagcaattaacaattatgttaattggaacaagggtggaaccacgaattcaacactcgtccctttttacgggatgagtgttttttattttgagaaaaagaggagtgaccagtgatggcagatgtagttaaaattactttccctgatggagctgtgaaggagtttccaaaaggcgtaacaactgaagaaatcgcagcttctattagcccaggcttaaagaaaaaagctgtagctggaaaattaaacgatgagatgatcgatcttgttacaccaatcgaagaagatggtgcagtttctatcattacattagattctgaagatggcctatatattttacgccattcaacagcccaccttttagcacaagcgttaaaacgtttatataaagatgttaaggttgagcttggcattggtccagtaattgaaaatggcttctactacgatattgatatggaagaagcaattacagttgaagacttcaagaaaatcgaaaaagaaatgcaaaaaatcgtgaacgagaacttagaaatcgttcgtcatgaagtaccacgtgcagaagcaattcgtcgctttgaagaaatcggcgatgagttaaaattagatttaattaacgatcttccagaagatgcagttatttcaatctatgagcaaggcgaatttttcgacctttgtcgtggtgttcaccttccatctacagggaaaattaaagtgtttaaattattaagcgttgcaggtgcttactggcgcggcgatagcaataataaaatgctacaacgtatttacggtactgcattcgttaagaaagcagaattagatgagcacttacgtatgcttgaagaagcgaaagagcgcgatcaccgtaaattaggtaaagaattaaaactatttactaatagccaaaaagtaggacaaggtttaccactttggttaccaaaaggtgcaacaatccgccgcattatcgagcgttacatcgttgataaagaagcaagcttaggctatgatcacgtatatactccagtactagggagcagagagctttatgaaacttctggtcactggaaccactaccgtgatggcatgttcccatcaatggaaatggataacgaagaattagttcttcgtccaatgaactgtcctcatcatatgatggtttataaaaatgatattcacagctaccgtgaattaccaatccgtattgcagaacttggaacaatgcaccgttatgaaatgtcaggtgcgttatctggattacaacgtgtacgcggaatgactttaaacgatgcgcacattttcgttcgtccagatcaaattaaagaagagttaaaacgtgttgtaaacttaactctagaagtgtacaaagatttcggtttagagaactactcattccgtctatcttaccgcgacccagcagatactaaaaagtattatgcggatgatgagatgtgggaaaaagcacaaggtatgttaaaagaagctatggatgaaatgggtcttgattactatgaagctgaaggtgaagcggcattctacggtccaaaacttgatgttcaagttcgtactgctcttggaaaagacgaaacactttcaactgtacaattagacttcttacttccagaacgctttgaattatcatacgttggtgaagacggtaaacaacatcgtccagttgtaattcaccgtggtgttgtatcaactatggaacgttttgtagccttcttaattgaagaatacaaaggtgcattcccaacatggttagctccagttcaagtacaagtaattccagtttctccgcaagtacatttagactatgcgaagaaagtacaagacgaattgcgtcgtgctggtatccgtgttgaattagacactcgtgaagagaagatcggttacaaaatccgtgaagcacaaatgcaaaaaattccgtacatgcttgtagtaggtgacaatgaagtaactgaaaacggcgtaaacgtacgtaaatatggtgaacaaaaatcagaaacaatcgcattagatgcttttgttgacatgattaaagtagaaggaaaacgataagaaaaagccgcggtataccgcggcttttttatgtaatatactcgagagaaattagaaaaaataaccatgtgacacttatcataaaaaagtattgcaagtatgttagttgtttgttacaatatttcttgttgttagtaaaacacatcgcgtcttcttgacagacgtcatgtcctatgataaactcatcaaggataatagaatattgttttgtggaacaagtagaagcacccgcttctcacctgatggacgcattcgcagttaacaggtaaatgtatttcttacttaagattttacaagtgtgggtgtcgtatgcccgcactttttttgttcgggttctatgactacaaaatatgttctgagaaaaccttggaggtggcttactattagcaaggatatgatgattaacgagcaaattcgtgcacgtgaagtacgtttagttggcgcaaatggcgatcaacttggaatcaagtctcgtaatgacgctttagacttagctgcaaatcttaatcttgatttagtattagttgctccaaatgcgaaaccgccagtatgccgcattatggactacggtaaattccgctttgagcaacagaagaaagaaaaagagcagcgcaaaaatcaaaaagtaattagcatgaaagaagttcgtttaagtccaacaattgatgaacacgactttaacacaaaacttcgtaatgctatcaagtttttagagaaaggcgacaaggttaaagcgtcaattcgctttaaaggacgtgccattactcataaagaaatcggtcaacgtgttttagatcgcttctcagaagcttgtgctgaagttagtacagttgaatctaagcctaaaatggaaggacgcagtatgttcttagttttagcaccgaaaaacgataagtaatagatagaggaggaaatacctatgcctaaacaaaaaactcatcgcggcgctgcaaagcgtttcaaaaagactggatcaggtaaactgaaacgttctcacgcttacacaagccatttattcgctaacaaatctacaaaagctaaacgtaaactacgtaaagctggtgtagtaagcgctggtgacttcaaacgcattcgtcaaatgcttgacaacttaaaataagttcggctgatatatagaacaattaggaggtaatattatgccaagagtaaaaggtggtacagttactcgtcaacgtcgtaaaaaagtaattaaattagcaaaaggttactacggttcaaaaaatacattattcaaggttgctaaccaacaggttatgaaatctctaatgtatgcattccgtgaccgccgtcaaaagaaacgtgacttccgtaaattatggattacacgtatcaacgcagcagctcgtatgaatggtctttcttacagccgcttaatgcacggtcttaaaaatgctggcatcgaagttaaccgcaagatgcttgctgacttagctgttcatgacgaaaaagctttcgctgaattagcaacagttgcaaaaaacaacattaactaattaattagttaaaaccttagaagaattttcttctaaggttttttatttgtattcaaagagaagttagaagtgaaaagaaattctaaagattaacgactatgtcattatcaatatgacaaaatcaatataaaagttatagcagtatagaagaatatatatatgaagtcaggagaatactcctggctttttttaattctgctcttttggaaagaagagtatctttcctagccgaaacgacactgctataatggaaagatgatatggaactttcatcagatgaacaatttaagagcgatgactgaaacgtatttgtaaattaaggacaagctattttataaagaggtagatagctgacttattcataagaactgaaacataataatgaactttgagatgaaacaacattgttgcgaaaaatgcgatgttggaggaggacaatagaatggacttactacaactatttaaattacaaaaagaattagatgaccgtattgcaaaagaacatgacttacaaccgaaaaaattgttaaaagaaaaaatgttagctcttcttgtagaaattggagaacttgcaaatgaaacacgttgttttaaatattggagcaacaaaccagcttcggaacgtgaagtaatattagaagagtacgtagatggtttgcattttattttatcaatcggaattgatttaggtattgataaaaacttcctattctataaatgtgcacaaacgaataaaacacaagtggaaattttcttagacacatatgcgaaagtaattcgttttacagatcaaccatctattacaaactatattgaattatttacgagctatcttcgacttggacaagcacttgaatttgagcaagaagagattgaaaaagcatatttagataaaaatgaagtaaatcatcagcgtcaaacacaaggatactaatttaatttttgaatatttcaatttaattattgtataataaattgactgaagaaaaaggagggtgttggcaatgacaaaattagacgcgacattgacaatgctaaaagaattaacagatgcacgtggtattgccggtaacgagcgtgaaccacgtgaagtaatgaagaaatatatcgagccgtttgcggacgaactttctactgataatttagggagtttagttgcgaaaaaagtaggggaagaaaacggtccgaaaattatggttgcaggtcatttagatgaagttggatttatgattacacaaatcgatgacaaaggtttccttcgcttccaaacggttggtggctggtggtcacaagttatgcttgcgcagcgcgtgacgattgtaacgcgtaaaggagatgtaacaggtgtaattggttcaaaaccaccgcacattttacctccagaagctcgtaaaaagccagttgaaattaaagacatgttcatcgatatcggtgcttctagccaagaagaagcaatggagtggggcgtacgaccaggagatcaagttgtaccttactttgaattccaagtgatgaagaatgaaaaaatgttacttgcaaaagcatgggataaccgaatcggttgtgcaattgcaattgacgtattaaaacaattaaaagatgaaaagcatccaaacgttgtatacggcgttggaactgtacaagaagaagttggtcttcgtggcgcaaaaacatctgcgaattatattaaaccagatatcgcgttcgcagtagatgttggtatcgctggagatacaccgggtgtaacgtcaaaagaagcgcaaagtaaaatgggcgatggaccacaaatcattttatatgatgcttctgttattggacatacaggtttacgtgatttcgtagttgatgttgctgatgaattacaaatcccgtatcaatatgattcagtagcgggcggaggaacggatgcgggtgcgattcacattgctgtaaatggtattccttctatggcaattacaattgcaacgcgctatatccattctcatgcggcaatgttacaccgtgatgattatgaaaatgcagtaaagttaattgtagaagttattaaacgtcttgataaagaggctgtacataacattacatttaattaatagaaaaagcgaaggacattctccttcgcttttttatgttttaaaaaggccgttctaatcccgctgcagtatgagcacctaaaataattaaacgagttaattgcatcgccataaaatgcggggtatatatcatccctctttttagccatgacataatcatccctagatgggcaccagtaacataactaatgagaatatcgcgtggaaccattagtttttcatcgttaggttgtgaaatagagaggcttaatgttaaatgcgtttgaattgctttcatcatcttatacgtatagtttccggccgctttatcaccaagcatgacgttatagaagttagtgttttctgcaatatgttcgaacaaggccaaaaaacttggatgtggcgaatcaaatgttagttggaaatcttctttatttctatttcttggtttaattacttcagttagcttttctaacatttcttcaatgcttttgtctagtaagtcatatttatcgtggtaatggctataaaatgtagcgcggtttacaggagcgcgttctgcaatatgttgaacagttacattttcaaaacctttttcgcctactaaagcgacaaaagcatcctgtatgagttgtctcgtccgttttacacgtggatcatttgtatttttaatagacatttttatttcccctcgtttaattttctatacttaaacaacatattggtattatattgttgtttaaccgacatttcatacataaattgtcggttgtagattcaaaataattatttataattataaacgatagtccttcagaaatcagcaccgctcgcaggtagataaatttcgatttacgctgcaaatggtgtgatttttttgttaaaaggttaatataattaacaattaaacaatctaaacaataaggacataaatagtttagaaaaaaattatatgcgatataaggagaggaatgcaatgaatcagtttcgaagaatggtaattatcaacattatcacattaattgtactagttggcggcggtattggcggttattactattacaatcaaacggaaaattacttaaaaacagacaatgcaaagattgatggaaaggtaattccggttgcttcaccagtagcaggtaaactaactgaatggaaagctgaagtaggaaaaaattataatgagaacgataaattaggtactgttactgtagcggcagctaatggagaacaaacagtagatgtaacaattccacaaaatgcaacagttgtacaatcaaacgcgacaacaaatgctttcgttggagcaggtagcccgattgcttatgcatttgatatgaacaatttatgggtaacagcaaacattgaagaaacagatgttgatgatgttcaaaaaggtcaaaatgtagatgtgtatgtagatgcatacccagatacaacgttaacaggaaaagtagaacaagttggcttaacaacagcgaatacattctctatgttgccatcaagcaacgcaacagcgaactatacgaaagtaacacaagtagtaccagttaaaatttctttagatcatagcaaatcagtaaatattgttcctggcatgaatgtgacagttcgtattcataagtaagggggagatgagatgtcctcaattgtaattgcaggatatgcactattttgtataatcgtcttcttccttgtaaatcgtcttttacgaaagaaaaaaacgaaaatgggagaagaacaagtcccagccgtaagtaaaatagaaataagtaaagttgaaacagaagagaaagaaattgaacgaaagcaagaatcggaaatttctaatgtagttgagttagaaacaggaaagcaagaagaagtaaaacaagaaaaagaagtgccgaaaaaacaaatgtctacgcctgtagagaatgtgaacgtaaaagcagttgtagctgtattaattctcggcatgttcgtttctattttaaaccaaacaatcattaacgttgcattacctccgttaatgaatgaatttaacgtatcaacttcaacagcacaatggttaattacaggcttcatgcttgtaaatggtattttagtaccgattagtgcatttttagtttcacgatttacgtatcgtaaattattcgtagcagcaatgttattcttcacggtaggatctatcatttgtgctacttccggaaactttacgatgatgatgacgggccgcgtaattcaagcagttggtgcgggtattttaatgccggttggtatgaatatctttatgacattgttcccgcctcataagcgcggagcagcgatggggttactaggtgtagcgatgattttagctccagctatcggaccgactgtaacaggttgggtaattgaaaattacagctggaacttaatgttctatgcgatgtttattatcggtttaattattacgttcctatctttaaaattctttacactagctcagccagtgtctaaaacaaaattagatgtatttggtgttgttagttcaagtattgggctaggaagcttgctgtacggatttagtgaggctggaaataatagttggactagtgcagaagttgttatttcacttatcattggtgtaattggtttagcgttatttatttggagagagttaacaacggacaataaaatgcttgatttacaagtatttaaatatccagtatttactttcactttagtaattaacgcaatcgttacgatggcattattcggaggtatgttattgcttccagtatatctgcaaaacattcgtggctttacgccaattgaatctggtttactacttcttccaggatcattaattatggggatcatgggaccagtagcgggtaaattattcgataaatatggcattcgtccattagcgataattggattggcaattacgacgtatgcgacatatgaatttacaaaattatcgatggatacaccgtatagcgttattatgacggattatattatacgttcaattggtatgtcattcattatgatgccaattatgacggctggtatgaacgcgctgccgatgaaattaatttctcacggtacagcaacgcaaaatacgtcaagacaagtagcgggttcaatcggaacagcgattttaattacacttatgacgcaacaaacgactgctcacgtagcagattacggcaacatgttaacaacatcaaacccaattttagttgataaaatacatggcatggggcaaagtttagcggccttagctggatcagctcaagcaggagacgcgatgagcacacaactattatatggacaaatttcaaagctatctgcaattaacggtattaacgatgccttcttaatcgcaacgatactagcaggtatcgcttgggtgttatcgttcttcttaccatcaggcaataaaccaaatagaaaagcagggaattaatttccctgctttttttgtctttttaaagagtaagatataaaaggtaataaccacttacagagcataatcctgttataaataaaatcgtccccatagaacgaatactcgatatgtgtcttccgtttactatagctaatagtccagctaaagagaagagaccccaatataaagttcctgaaattggaatcatcccctctaagtctattccataacctatacaaatgataggaacaacgataagagatatgctaattaaaccagctataatagtaaatgatttacgacatttcataccagcaataattaaaaaaatgccgacgatgaattcgcataacattaaagtaaaagctaaaatcatccaaattaatattccgaacatttctgtattacctccgatttgtgggtttcgaaaaaagttatatagaatcaatcacctacagacatgagtacccagaagataacccctaatattccaatggtaaaaataatgaaccccatattacgtatacttttaatttttgcttggaatccacttatccctgctaataatccagttaaagaaaatagggtccagtaaagagcagttggaatggggaatattgtatccatattaattcctatacttaaaaaaacaaaaggtagtgtgacaaaggataggctaagtagccccattaaaccaacgagtaatttccgatatttaattcctgttactattaaaaaaataccaccagcaatcccgcatagtaagagaagtggcgtgaaaagcatccaaataacactaaacatatgtaaactcctttatatgaattaagttatattttactacatgaagtttattttggataatattaataaatatgtataaattgatggaaatgagaagtgattatacgaattaataaaagaggtatcgtgaggatacctctttctaattcaagaatgccaacatattattcataatatgaaataacatagctggaataatggattttgtttttttacataaaatagccattaataatcccatgaagaaagtaatgaccattacgccaagtgagtatgtatgagcgataccgaagaagaagcttgttataatcgctgcaatccaaaatggaaagcgttctgagaaaaagcgaagtataaagccacggaaaataagctcttcaaaaattggtgtgagtattgcaaagccgagaagtaataatatttgatactgcttaaagacatctaagtttagtgcggaagattgctgctttgtagcgtcttggaacacataatttaacaagatgtaattgagtaaaatgtttatagcgaagaaaagaagtaagtatacgtatgtacgccattctttcagtgctttaaagttaaatgattgtagtagtaatttttttgcgggttcgaatttaaaaatgaagaataacaacacggctagctgtaatacaatacttgcagtatttacgatagattcatacagggcaatttgttttttatctgtaagactggctgtataaattgttaagggcattgcgaggaacacagtaataagtccggttccgaaaaaagcgaatacaacggagctaataaattgtccccatgacatagagtatttctgttcattagaaagttgtgtagcgggttgcatatgtagaatcacctctttatatttgtatatttaattataaggcattttgttttcaggcgtaatatttaaatattacatataaaggtgtattttccataaaataataaaagaggtatcaccctgtagtgatgcctctttctcattgataactatgttctgtcttgttattcaattttgcttgctctatttgcaattcacgctctaccaatcgatctaattgctgaattgctttaagtgctttttcataagaaattgttcgataatgatgcgctccgcccggttcttcatctgcttcgtctgcccatttaataatattttgaagagatgttctttcaatttcttgttccactaagaaagaatctgtatgaagaagaattgcaatagaaatttcttttgctagttttggatgttctcctaatctaataagtaatttatgtgctctttcagcgcctttaattgcgtgtatatcattctttttatataagtcataatcccattcaccgcctgtgtaccacgtatgatgtccgatatcatgaaggaagccagcttttgtggcagcatcgactgaggcgtgatgctttttggctaggtgaaacgcatggtaagcgacagcgatcgcgtggaccattccagaacggtttacgtatttttgtgtaatgtggtgtttaaaaatttgttcaagcgtaatacggtgcataaaacattcactccttttatcttatggtgtatatgaagaaaaatcgatcggtttaaatgtattttgaacattgtactccatcatagttcgttagtaaagtagaaatgtttaggagaagaaaaaatttttctgcaaaaaaatcaccttagcttatgcaaaggtgattttcaaattgcttatttttttaatccttgctctagtgtttctaacatttcgtgcttttcattttcatcagcgtttttccaaatgacttcaaataaaacgccaagacctggaagcattttttcttcaccgctttgaattgcatcgacgattgtttcttgtaattgatcttgtgaatttccagatacattcgctaatacagcaccgcgtaaattaaaactcattgctttcacctcttcttcagaattgaaactgacgttagtttttgttcttttttatgtaaatatgtatgaaaaataggctataatgataagacaagaagagagggaaatacatattatgaaaaacattgattcagtacaaaatccgcgtgtaaagcagtggaaaaagctgcaaacgaaaaaagaacgcgataaaaaaggtttattttttgtagaaggattccacttagtcgaggaagctttgaaggcaggaattgtaacagaacttatcgtttcagatcagacagaccttccgaaagattggacagttaatgatgtggaaatgtatatcgtacctgaggcgattgtcaaaatacttcgtgaaacagaaacgacacaaggtgtatttgctgtttgtgagaagcatgagaaagaagtagctcttactgatgggaaattccttttattagatggcctgcaagacccaggtaatttaggaacaattattcgtacagctgatgcagctggtattcacgccgttgtgcttggagaaggttgtgttgatgtttacaatagtaaagtactccgctctacacaaggctctattttccacttaccaattgtaaaagggaacttagaagaatgggtagacaagttaaaagaaaacaacgttcctgtatatggaacagctcttgaaaatggagttccgtatggtgaagtaacgccggctggcagttttgcattaattgtaggaaatgaaggaaatggcgtacgccaagaaattcttgcaaaaacggatcaaaacttgtatattccgatttacggcggggcagaatcattaaatgttgcggttgcagcagggattttaacgtattatttgcaaagcccggttgcgaacaaataaaaaacttcttataataagttgaagtacattatattaaaagttaaataacgaaaaacgttgatagagaagagtaacttacaaaatcgccatatagggagagagtgccgtagactgaaagcattcttatggtagacggaagtgaattcacctctggagttgacgccaggaccatgtatatgtaaaggcgttccggtcagaattgatcgttataactaatgagtgggcagacttgttctgtcaatttagggtggtaccgcgaatttacctcgtccctttttgggagcgaggtttttttatttttaaaattaggagggttccaaaatggaagcacgtttaaaagagctaaagcaaaaagcgttagagcttattgaagaagcgaaagagctaaagggcttaaacgacgtacgcgtagcgtatttaggaaaaaaaggcccaattacagaagtattacgcggcatgggaaaattgtcagcagaagagcgtccacgtatgggagcattagtaaatgaagtgcgtgaagcgattcaaacgcgtttagatgacaaaattagtaacttagaaaaagcagtaatcgaagcgaaattagctactgaaacaatcgatgttacactgccaggtcgtcctgttgaaacaggttgtcaccatccgttaacagctgttgttgagcaaattgaagatgtattcatcggtatgggttatgaagtagctgaaggaacagaagtagaaaaagactactacaacttcgaagcactaaacttaccgaaagatcacccagcgcgtgatatgcaagatacattctacattacagaagaaacgttactacgtacacatacatcttctgtgcaagcacgtacgatggaaaataataaagaaaaaggcccaatcaaaattatttgtcctggtaaagtgtatcgccgtgatgacgacgatgcgacgcattcgcatcagttcatgcaaattgaaggtcttgtaattgataaaaacattcgtatgagtgacttaaaaggtacactgcaagtattcgtgaaaaagatgttcggtgaagatcgtgaaatccgtcttcgtccaagtttcttcccattcacagagccatctgtagagatggatatttcttgtatgatgtgtcatggcaaaggttgcggcacttgtaaaggaactggctggattgaaattctaggcgcaggtatggttcacccgaacgtacttgaaatggctggttatgattcaaaagaatatcaaggtttcgcattcggtatgggcgcagagcgtatcgcaatgttgaaatacggagtagatgacattcgtcatttctatacaaatgatgtacgtttcttacaacaattcaaacgagcgtaagggaaggagaggataaatatgttcgtatcatatcgttggttacaagagtatgtagatattaaagatgtaacagcacaagaactagcagacaaaatcacgaaaagtggtattgaagtagaaggcgttgaagtattaaataaaggtgtaaaaggtgttgtagttggtcacgtattagaatgtgaaaaacacccagaagctgataaattaagcaaatgcttaatcgatatcggtgaagaagagccagttcaaattatttgtggagctgctaacattgcaaaaggtttaaaagtaccagttgcaaaagttggtgctgtacttcctggtaacttcaaaattaaaaaagcaaaactacgtggtgaagcttctcacggtatggtttgtgctcttcaagagcttggcattgatggaaagttagtttcaaaagaatatgcagatggtatcttcatcttcccaagtgacgctgaagttggtgcagatgcacttgaaattttaaacttacacgatgaagtacttgagcttggtttaacaccaaaccgtgcagattgcctaaacatgttaggtgttgcatatgaagtagctgctatttatggccgcgaagtaaaacttccagctatcgacttacaagaaacagcagaaaaaacttctgattatatttctgtaagtgtagaagcgaaagaagaaaacccgttatacattgcaaaaatggttaaaaacgtaaagattggtccatcaccaatgtggatgcaaactcgtcttatggcagctggcattcgtccaattagcaacgtagttgatattacaaactacattttaatggaatacggtcaaccgttacatgcattcgattacgataaattaggttcaaaagaaatcgttgttcgtcttgcaaaagaaggcgaaaaaattgaaacgttagatgatcaagagcgtacattacaaagccaccatcttgtaattacaaacggcacgaaagctttagctgttgctggtgtaatgggcggggcggattctgaagttacaaatgagacagtaaacgttctaattgagtctgcatactttgcaggtcaaacagtacgtcgtacatcaaaagacttaggtcttcgtagtgaatcaagtgcacgtttcgaaaaaggaatcgatccaacacgtacatttgaagcaattcaacacgcagctgctttaatggcgaaatatgctggcggtgaagcacttgaaggtgtagtagaagctgacaacttacaagtacaagagcgtacagtatctgttactgctgaaaaagtaaaccgtgtattaggtacaaatatttctgcgagtgaaatgggtacaatgttcacaaacttgaaattcccatttacagaagtagaaggaacattccatgtaaatgtaccagcacgtcgtcctgatattacaatttcagaagacttagtagaagaagtgggccgtctatacggttatgaccacattccagttacattaccttctggaacgatgactcgtggtaaattaacatcagcacaaacgaaacgtcgtaaagtacgccgcttcttagagggtgctggtttatatgaagcaattacgtattcattaacaagcgctgacaaagcgaaacaatatatggttgagccaaacgaaaaggcgcctgtaggtcttgcacttccaatgagtgaagaacgtagccaacttcgtttaagcttagtaccgcaattactagaagcagtttcatacaatgtcgctcgtaaaaacgacagcgttgctttatacgaagtaggttctatcttcttaccgacagaagaaggagaacttccgaaagaagaacaacatcttgcaggtgttatgacaggtcttgctcttcaccatgcatggcaaggtgagaagaaagtagtagacttcttcgttgtgaaaggtgtactagaaggactattcgacgtgcttggcgtttcaaatcaaatcacatatgcaccagcaaaacgtgaaggtatgcacccaggccgtacagctgacatcgtattagatggcgaagtaattggtttcatcggtcaattgcacccagaagcagaaaaacaattagatgtgaaaaatacattcgtatttgaattatctcttgtaaaagtattcggtgcagacgctgaggaaacttactactcagcaattccacgtttcccatctatgacacgtgacatggctgttgtagtaacaaaagaaacaaaagctggtgaaatgaagcaagtcattgctgaagctggcggagaacttctgaaagacgtaacactattcgacttatacgaaggtgaaaaaatggaagaaggcaagaaatcacttgcattctctatgacttacttcgatgcagaacgtacattaacagacgaagaagtaacagaagcacataaccgtgtactaacaacggtagaagagaaattcggtgcggagttacgtaagtaattagaaaattgccggattcattccggcaatttttttattggattggttgtcggacactgtcggtaagtcgatatattacaaaaatcgctcatatattttccgacaccttgcatctttctctcgaatgtagtacattaattttagtttaacaaaatgaaagacgatgataaggaaaagtagtatatactataatccaaagcgagtcagggacggtgagagcctgatgaggcggtatatgtgaagaacaccttggagttgctaaccgaaattgaattttgtattcaagagtagacttagacgggaatccggcctgttacaaaccgggaagtatgtattacatacgagttaaagttggtctttatgacaaattgggtggtaccgcgaagtttaacctttcgtccctttatggatgaaaggtttttttgtatttaaatatatgagcaaaggagaatttcactatggaaaacacattagtaaaaagtctgtatagagatacagaaaagtatgcagatcaaacagtacaagtatcagggtggattcgtaacttacgtgattcaaaagcatttggtttcatcgaattaaacgacggtagcttctttaaaagcgttcaaatcgttttcgatacagaattagagaacttcaaagaaattgcaaaacttccacttagctcttcagttaaagtagaaggtaaagtaattgcaacgccgggagcgaagcaaccatttgaaattaaagcagaaaaaattgatatcgagggtttatcagattctgattacccacttcaaaagaaacgtcatacgtttgaatacttacgtacaatcgctcacttacgtccaagaacaaatgcattctctgcaacgttccgcgtacgttctatcgcagcatttgcgattcaccaattcttccaagagcgtggattcgtacatgttcacacaccaatcatcactggtagtgatacagaaggtgctggcgaaatgttccgcgtaacaacgcaagatttaaataacctaccaaaaggtgaagacggaaaagttgatgagtcaaaagacttcttcggtaaagaaacaaacttaacagtaagtggacagctgaacgctgaagcttatgcattagcattccgtgacgtatacacattcggacctacattccgtgcagaaaactcaaacacaactcgccacgctgctgagttctggatggttgagcctgagattgcattcgctgaactaggggacgtaatgaaccttacagaagatatgctgaaatatgcaatgaaatacgtattagagcatgcaccagaagaaatggaattcttcaacagcttcgttgataaaacagttcttgagcgcatgaacaacgtaattaactctgacttcggtcgcatcacttatacagaagcaattaaagtgcttcaagaatcaggtgctgacttcaaatacccagtagaatggggaattgacttacaaacagagcacgaaagatacttatcagaagaaatcttcaaacgccctgtattcgtaactgactatccgaaagacattaaagcattctacatgcgtttaaatgaagacggtaaaacagtagctgctactgaccttctagttcctggcatcggcgaattaatcggcggaagccaacgtgaagaaagaatggacgttttagtagacagaattaaagaattaggtatgaacgaagaggactactggtggtacttagaacttagaaaatacggcggtacaaaacacgctggattcggtctaggtttcgagcgcttcctaatgtacatcactggtatggctaacatccgtgacgtaattccattcccaagaactccaggttcttctgaattctaaaatatgaaaaaaggcgagaggatttcctctcgctttttattttacatattgtatagtttattccctcgtagcaaaaagtaacgcgaaggggtgaatataaatgagtaaaaaagtgaaaaaagatcattcaagatcgggcctaggttctccagaagttgaaggacaaggaacgacgacacatgaaacaggttctcataaagtatcttcatcaaataagaagcagaaacgaagctaacataacaaaggagagtcttaagggctctcctttgttatgtgttacatcttattatcgttaatttcttttgtaatcttatttatgtctttgtctaatcgatctaaatagaaaaaccacagtaaactcatgaacacgtaatagatggccatcacgccaagattatcatatatattttcgaatgtggatttagtagtgaaaaaagctccccaaatgatagaaatagtgaggtaagaaagtggacctacgaggtgtacgaaagcatatcgtacctttttaacttttacagcgttcatatgaaaaacctcctttttctaatcatacattcaagttcttcacagaagtgttgtagttttgctggattatgtattaacaagcgtgcatcgtgtttcccgataaatcttcgaatccgaaagtttaataagaaagatcgaccataacgttctattaaatcgttgaacgctggttgtccacttagtagctgaatgttttctctaatttcgaactgtctttcgtgtggatcgcctagtaaaatatttagaatcatttgtagaagtagcaatgtagatctcctcctatgttagaataatctgtatattataattataacaaaactataaggacaatagtaggatgaaacaaaaaacaggagtttgtaggctcctgtttttgtcgatactattttaataagcgaagcgccttctccgtattagcgaaatgcagtttcacaaactcgggtaatcgttctttaccaagcttttgaattaatttagcagcagcgatatcaacttgtttaccagcacctttcggaagtggcataccagcttttttacttagttcgtcaaactgttttacgaatgagtagcgagctaaaatagaagcagcggctactgctaaatggacgctttcacctttcgtagcaaaataaacattttcacgctgtacctgtttttgttttgctaaatatttgtagtatgtatcaggttgtgtgaattggtcgattaagacgccttcaggttttgtaggtgccattttcgctaataagtttgtaatagctttattatgtagcaaggcttttaacttaccttggttgtttcctttatcaaatagctcgttatatttttcattatgaaggacaagagagctataaggaacaacgtgtagaagttgtttcgcaatggcaataatttgatcgtcatttaagtttttagagtcttttacaccaagttcttttagtagtggaatttgcttcgcatccacatatacagcaacgactgtcatcggtccaaagaaatctcccgtaccaacttcatcagaccctacaatagacattgtactgatggaagtaggcggcgcataacgatgggaatcgacagatttttttacagctgttttcggcgcgtgagagacagtttgccaacgagaagcttctgcttcagcgcggcctccttggaacattacttttccagatttatacgctgtaatcgtgcaagatggcaccttagccataaagataccgccttgcggaattttcgggctaagtgaatgtttatattgttgtttcatgtcttcaattactgtagaatttgtttgaattacgatagaatttgacataatggtcgcccctttttttatattgttatttttatcatatcggattgttctttctgtttccatattatgaaggttcatggtatgataaactttaggattctgtacgtgattggaggccggtgagttgtcacaacaaaagggaaagaaaagtcgaattaatgtagaaatctatggtcagcaatattcagttgttggcgatgaaagtacaagtcatatccgcatggtagcagcgattgtggatgataaaatgcgcgaactcaatgccaagaatccttcgcttgacacgagtagactagcggtattgacggcggtaaacgtcatacacgattacataaaattaaaagaagaacatgagaaattgaaagaaagtatgacaaaaaaaggaatggaataacatgattgatattattatcattttactgcttgttatgggatttttcctcggcttacgcagagggtttattctgcaacttgtaaagttaacaagctttattatcgcataccttgttgcatactggtactgtaaagatttagcgccagcacttgcgaaatttattccgtatccatttgataaaaacgtatctgttccagaatggattgatgcaaataatattgagacagtattttatcaagcgcttgcgtttatcatattgtttattattacaaaaatagcactttcattacttggtaatttgttaaatatgtttgcagaaataccggttttaaagcaagtaaatgcgtttgcgggggcaatcctcggatttttagaagtatatattgttttgtttgtcttaattatcattggaaacattcttccgattgaacaagtacaaacaccattacaaaaatcatcaattagcaaaataattgtagacgatacaccgattctatctgaaaaggtgaaggaactatggcagacaggtagcagagtataacttctcttttttcggaaagagaagtttttttctatgaaagaaaggcggggtaatgatgaaagtaaataaaaaacaagttatcaaattattagagacaatcgggctttttatggaactaaagggtgcgaatccatttaaaatatctgcatttcgtaaagcggcagcagcattagaaagtgacgatcgtagtctttctgagattgaagatttcacaaagattccgggcatcggaaaaggaacagcagccgttattcaagaatatatagaatcgggaacatctgaagtattacaagaacttgaaaaagaagtaccgagtagcttattgccgttattaaaactaccaggtcttggtggtaaaaaggtggctaagttatataaagagctaggcgttattgatatggagacgttaaaagctgcttgtgaggaaaataaagtacaagctttagctggtttcggtaagaagacagaagagaaaatattagaagcaatcgatcaagtaggctctcgtccagagcgtttaccaattgcgatggtattgcctattgccggggaaatagaggagaaattgtcgaatattgctgaagtaattcgtttctctcgcgctggtagtttgcgccgtgttcgtgaaacagtgaaagatttagattttatcattgcaacgacagaaccagcaacggtacgtgagcatttactacaattcgataatatgattgaggtaatcgcaagtggggatacgaaagtttctgttcgtcttcaatatgaatatgatatttcaatcgatttccgcttagtaaaaccagaagagtttattacaacacttcaccatttcacaggatcaaaagaccataacgtaaaaatgcgtcaaatcgcaaaagataaaggcgagaaaattagtgagtacggtgtagagaacttagaaacaggtgaagtgaaaacatttgagactgaagaagacttctttgctcatttcggtctaccatttattccgccagaagtgcgtgaagatggaaaagaaattgaattaattaaagagtatccgaacttaattcagttttccgatatacaaggtgatttacatatgcatacaacttggagtgacggtgctttttctattgaagaaatggtacaagcgtgccgtgctcgtggatataagtttatggcgattactgatcactcgcaatacttaaaagtagcgaatggtttaacgaaagagcgtcttcgtgagcaagcgaaagaaattgaacgtatgaatgaaaagtatccagacattacaattttacgcggaattgaaatggacattttaccagatgcctcgcttgattttgatgatgaagtattagaagaattagactatgttattggagcgattcactctagcttctcacaagaccgtgaaacgatcatgaagcgtctgcgtactgcacttgagaataaacatgtcacaatgattgctcatccgacaggacgtcttctcgggcgccgtgagggttatgatgtagatacagatttattaattgaactcgcaaaagagacaaatacagttttagaattaaatgcgaatccgaaccgtctagatttaagcgctaaattattaaaacaagcacaagatgctggtgtaaaagtagcgattaatacagatgctcatacacttgaaatgttagaagatatggaaacaggtgtagcagcagcacgtaaaggttggattcaaaaagataacgtgattaacacatgggatattgaacgtttattagactatattaaacgtaataagtaacgcaagggggacctgcaacatgttagaaagaacgttgcgtgtattagaatacaataaagtaaaagaacaattacttgaacatacagcctcttcacttggccgtgacaaagtgaagcatttagtgccgagcactgattttgaagaaattgtagaaatgcaagatacaacggatgaagcagcgaaagttattcgtttaaaaggtagtgcaccattaggtggtattacggatattcgctcaaatgtgaagcgtgcaaaaattgggagtatgttaagtccaaatgaattacttgatattgcgaatacgatgtatggtagtcgtaatatgaaacgtttcattgaagatatggctgataacggtgtcgagcttccgattttagaaactcacgtcgctcaaattgtatctttatatgatttagaaaagaaaattacaaattgtatcggtgacggcggtgaagtagtcgatagcgcaagtgataaactgcgtggtattcgtactcaaattcgtactgcggaaagccgtattcgtgaaaaattagaaaatatgacgcgctcttcaaatgcgcaaaagatgctgtctgactcgattgtaacgattcgtaacgaacgttacgtaatcccagtaaaacaagaataccgcggcgtatatggtggtattgttcacgatcaatcagcttctggacaaacgttatttattgaaccgcaagtcattgtagaattaaataacgcactgcaagaagctcgtgtgaaagagaaacaagaaatcgaacgcatcttattgatgttaacagaagaagtggcagtagaagccgatatcgttttatcaaacgtagaagtagttgcgaatcttgatttcatttttgcgaaagctttttatgcaaagcgaattaaagcaacgaaaccaatcgtaaataacgagcgttatatggatttaagacaagctcgccatccgctaatcgatccagaaattattgtgccaaataacattatgttaggtaaagatttcacgacaattgttattacaggaccgaatacaggtggtaaaacagttacgctgaaaacagttggtatttgtgttttaatggcgcaatctggtcttcacattccagtaatggatgagtcagagatttgtgtgtttaaaaatatatttgctgatatcggtgatgagcaatcgattgaacaaagtttaagtacgttctcctcacatatggtgaacatcgttgatattttagaaaaagctgattttgaaagcttagttttattcgatgaattaggtgctggaacagacccacaagaaggggctgcactagcaatttcgattttagatgaagtatgtaatcgcggtgctcgcgttgttgcaacgacgcattatccagaattaaaagcatacggatataaccgtgagcaagttattaatgcgagtgttgagtttgatgtaaatacattaagtccaacttataaattattaatcggtgtaccaggccgtagtaatgcctttgaaatttcgaaacgtcttggattatctgatcgcgttattgaccaagcacgcaaccacattagtacagatacgaataaaattgaaaatatgattgcgaagttagaagaaagccagaagaacgcagagcgtgactggaacgaagcagaagcacttcgcaaacaatctgaaaaacttcatcgtgaattacaacgtcaaattattgaatttaacgaagatcgcgatgaacgattattaaaagcgcaaaaagaaggggaagaaaaagtcgaagctgcaaagaaagaagcagaaggcattattcaagaacttcgtcaattgcgtaaagcacagcttgcaaacgtgaaagaccacgagttaattgaagcgaagagccgtctagaaggcgcagcaccagagcttgttaagaaacaaaaagtaaacgtgaaaaacactgcgccgaaacaacagttacgtgcaggtgatgaagtaaaagtattaacgttcggtcaaaaaggtcaattacttgaaaaagtaagcgatactgagtggagcgtacaaatcggtattctgaagatgaaagtaaaagaatctaacatggaatacattaacacaccgaagcaaacagagaaaaaagcagttgcaacggtaaaaggtagagactatcacgtttcattagaacttgaccttcgtggtgagcgatttgaaaatgcaatggcgcgcgttgagaaatacttagacgatgcccagcttgcaagctatcctcgcgtatcaattattcacggtaaagggacaggagcacttcgccaaggtgtacaagattacttgaagaagcatcgcggtgtaaaaaccttccgttacggtgacatgggcgagggaggcctaggcgtaacagttgtcgaattaaaatagaaaacaacgaaacaaaggggaaaccattatatgtttatggacaaacttgcaaaagtattgttagcttgttgcggaatatttttggtgattggggttatttatttagttgtttttgcgaagtgaaaaagcgtcaatcgtggcagaatgatattgccatagattgacgcttttaatatatgtgaaaaggaatagaacatgaaaatcaaccaatacataagcgaagcaaaatcatgctccagacgtgaaacagatcgcctcattaaagctggacgcgtggctattaatggtgaaatatgtacgcacggtgaacttgtgagcgatggtgatgttgtaacgattgatgggcaagttattgtaaaagaagagaaagaaaaggtgtacatagcctttcataaaccagtcggaattacttgtacagcagctgatcatattgaagataatattattgattatatcaattatccagagcgaatctttccagttggacgattagataaagtatcggaaggacttatcttattaacgaatgacggcggcattgcgaatcgaattttacatggtgatcatgagcacgagaaggaatatgttgtcacagtcgataaaccttttacggactggtttattaatgagatgtccagcggtgtaaagattaaagatggaatgacgaagccgtgcaaagtgacaagagtcgatcaatcaacatttcgtatcgttttaacgcaaggaatgaacaggcaaattcgtagaatgagtcgtgctttcggatttactgtaataaagctaaagcgagtacgcattatgaatatagagctaaatgagcttgaagttggaaagtggcggagcgttacagctgaagagttagaaattttaatagggcagttatagggagggaaaattttctccctatatttttttgtcagaaaaaataaaactattgattttttaaaaaatagcccatataataaaaaacaacaagtttcgacaagatattttataaaagtaatgatgaggacatgagttgtattttacgattctcagagagggaagccttaggctgtgagcttcctaatacgaaaagacaagcttaccacctctaaacttcaagagtgaactgcatacatgatgcattgtaattcttggcggataaaaccgttatcaatttacacgagctataaaatgagcttatttcgttatgaattcattttattagaataagggtggaaccacgatttcaacactcgtccctttgttagggacgggtgttttttgcgttcttttacggggaagtatgcttgaaagaggatatgtgacggattttaattcagaatattttgttaattaattattttaggaggttagtaggaatgaaatcatctttaaagttttcggagatgtttgcaataagtttaatgttatttgcactgttttttggtgcaggtaatatgatttttccaccagcgttagggcaaggtgctggaacggacgtatggatcgcgctgtttggttttatcgtaacaggcgttggactacctttattaggagtaattgttatagctttaaagggagatattaatgagctagcaggacgtgtacatcctatattcgcacttgtttttatcactgcaatttatttatgtttaggcgtattcgtaagtgtaccgcgtacaggaacagtagcttatgagatgagtgttgcaccgtttttaccaagtgagatagctggtcagtcatatccacttgttatctttacacttattttctttgcagtcactttctatttagctttaaatccttcgaaattagtgggtcgtattggtaaggtgctaactccaatattattagctgttattgcaattatcgtaggtaaagcacttattacaccaattggagaatttggtgcaccgacagaagcgtatagtgctcctctctttaaaggatttattgatggatatttaactttagatggacttgcagcactggtattcggaaatgttgtaattcatgcgttaaaagaaaaaggaattacaaataaaaacagtattgcaaaagtaacaatctttgcaggatttattgcagcacttggtctactacttgtgtatttagcacttgcttatcttggagcttctagtgtgtcacttggaatgggcgcaaacggaggaattattttaacaaatgtcgtgaatcatttatttggtagctacggaactttattactagggatcgcaattacagcagcatgtttaacaacttctgtaggtattgttgcagcttgtggtgattacttctcttccttattaccaaagctttcttatcaaaaagtcgttttcattttctgtgtattagcatttatggtagcaaaccttgggttaactcagttaaatgcattagcattaccaatcttaatcgcaatttatccaattggaatcgtacttatcgtattatcacttgttgaaaactacgttcgtcttccattagcgatgtatgtgggcgggattgtaggagcatttgcaataagtttctttgatggattacacaatgcaaaccttcaaattgcagcgctagcacctattttagataagattccattatatagtgtaggaattggttggttagttccaggcataatcggtataggatttggttatatagtttctaagtttcaaaagcaggaaattgctgtagaaaaatagagaaaagaggctttctattatagaaagtctctttttttgtaaaaaaagccgtatatagagaaattcagatattaaaaattttatacgtaatatagttgacaaaaaatttatgagtaggctaagattgacttagttgtggaaatattggaagggaagtgagggaaaaggggtttctataactatagtgttgttgtgggaagaggtgaaagaagaggagaagagatagtttatttttttttgatttacattgagaatgataatcaataaatgcgttttatcattttttctcagtttctatgccttcgtataaggaatagggtgagatattatttttaatattcaatgagaatgataatcaataatacttatgttacataaaagaatgctaattaaataataggtagaagagattattttttttcttataaattgagaataattatcattttcaaaaagtgaaatgaaagataaccaaggaggaaacaagaaaaatgaaaaaggtttctgtattacccgcttttattataacgttcgtatgtatgctagcttttcttgtaatgccatacgggaatgcttcagcaaaactagctgatggtacttacgatattaattacgtaattcaaaaagcggaaaatgattcagcttcaatggcaaatgactattttgaaaagccggcaaaattaatagtgaaaaacggtgagatgagagtacaagttccgatgaatcatagtgcttggattacagaatttaaagcaccagagaatggggattttgttgatgcgaaagttgttagtaaagatgaatcggcagataaaagaacagtagagtttaaagtagatgatttatccaaaccggcagctgtaaaaattcatgttgttgtaccaaatgcaaactatgaccaccactacacaattcgttttgcttttgatgcaaatgtaaaagctgtaggtggcgataacggcgtagctgctacaacaaaaaataatgatcaagcgaaaacagatacacaagtaaaagaagagaaaacaaaagtagagagtaaggaaacagctaaagaagtgaacaaagaaacaaaaaatgaaaatggaaaagctgaaaaaacagataacccaaaaacaggcgatgaagcacgtattggattgtttgtagcgttaattcttatttcaggtgctttcttaattcgtaaagtgaagttgagtaaataaatcttttgaagggggatgaatatatgtttaaacaatttaaaatgattattgctgtatttgctgttttatttacgtttatcgcaacactaggtttacaagatgcaaaggctgctacaaaactagctgatggaaaatataatattgcttttactgtatggaaaggcgataaagatgaatcgtctagaatgaatagttattttgaaagcccagcaacattaacagttaaaaatggaaaacaatatgtttcatttaaagtgaaagatagtgcttctattaaaagtttccaagtagaaaaagatggtcaatttgtagaaacaaacgtgttaagtgaaaacaaaaaagataatactagagtagtagaatttgaagttgctgacttgtcaaaaaaactaaatggaaaggtggaaattaatattccaattattaattataatgcttcatatgatattcgctttgtatttgatgggagcagtattaaataattttcaaaagggagagtcgttccattgaacaggtatacaaaaattattgttgctatgtttttaatgatatttacattcgtatcaacattacaaccacttgcagttcaagcagctaccaagttggctgacggtgaatattcaattgggttcaaagttttaaaagatacatcagatgaagaatcaatgatgaatcaatattcagtaagtccgggaactttaaaagtgaaggatgggaaaaagaaagtatcctttacattaacgaatagttcatggattacgaagtttgaaacagaaaaagcaggtaagctagttgcgacaaatgtaattagtgaagataaagaaaaagatacaagagtagtagaatttgatgtagaagatatagagaaggtattaaatgcaaaagtaaaagtagatattgattttttaaattatcatcatgagtacgacgttcgtattgcatttgatcaaaatagcattacaccaattcatgtagaaaaaccaaatgaaaaagaggacccagctaataagccagatccaaatgaaactaccgatccaggtcagaagcccgaccaaaagcctgacccagatcaacaaccaaattctaacacaattacagatggtacgtacagcattccatttaaagtattaaaagatcaaacagatgaagaatctaagatgaatacttacatggtaaatccaggagtattaaaagtagaaaacggtaagaaaaaagcaattgtaacactaaaaagtagctcattaattaaaaatttccaaacggaaaaagatggcgcatttgttgatgcaaaagtagtgagtgaggataaggaaaaagatacaagagtagtagagtttgaagtaaacgatttatctaaaaaactaaatacaaaagtatttatcgaaatggcatcaagaaattataagcaaacgcatgatgtacaacttttatttgaacaagataaacttgaacaaattaaaaatgaagagaaacaaccagaagcagaaaaaccggaagcagaaaaaccggaagtagaaaaaccagatgaaaataaaaaaccagatgctgaaacaattaaagatggtgaatacagcatcaatttcaaagcattaaaagatcaaacagacgaaatttcaatgatgaacacatatacaaaaagtccaggtgtgctaaaagtaaaagatggtaagaagtatgtatcatttacgttaacgaacagttcttggattacaaaatttgaatttgagaaaaatggttcgtttgttgatgcacatgtaataagtgaagataaaaaagctgatacacgcgtagtggaagtagaagtaccagatttatcaaaaaagttaaatgcaaaagtaaaagtagatatcgattcaatgaattatcaccatttttacgatattcaatttgcatttgataaaggtagcattaagccgttagatagccaaggcggaaacaacaaccaaggcggaaacgacaaccaaggcggaaacaacaaccaaggcggaaacgacaaccaaggcggaaacgacaaccaaggcggaaacgacaaccaaggcggaaacgacaaccaaggcggaaacgacaaccaaggcggaaacgacaaccaaggcggaaacgacaaccaaggtggaaacaacaaccaagatgaaaataataaaccgagagtaatagttgattcgaaaaatttagtagatggccaatatgatattacatttaaagtattaaaagataaaacagatgagatttcaaagatgcatgactatgttgtaaatccagcgaaattaatcgtaaaagatggtaaaaaatatattgagatgacgctgaaaaatagtgcgtggattacgaaattccaagcggaaaacaatgaactattcgctgatgcgaaagtagtaagcgaagataaaaatgcaaatacgcgagtagtacagtttgaagtagaagatctatttaaaaaattaaacgcaaaagtaaaggtagacatcgatgagatgaactaccatcatttctacgatgtacaaattcaatttgatacaaataatatcggcgcgttaggaactattaaagaggaaccgaaaaatgaaccgaaaaatccagtgactacaccgaaagtagataatgtaaaaacagtaggtactcctgattttaaccgaaatgcagatggtcagaagaaaaaagaagatacaaaaaatgattcaaaaaaagagaaaaactcaaaaactgcagatacagcacaacttggtttatacatggtgttactgctaggttcacttgctttactagttcgtaaatatagagcaggtagattgtaatttttggagtcttgatgcatgttcgcgtgcatcaagacttgtttcatattgtatggaaaggagtggtgattgagagtgaagaaaattgcaagtgtactaatggctatcattttgttaatgggtatagccgggtgctcatcaccaaaaaaagaatcagcaaagcaggtaaagagtgaaagtaaagagcacgttgttgcaacaacagtggctgttactgaaattatggatgcgttagaagtagatttagtcggcgttccaacaagttctaaaactttaccgaagcgatataaaggtttacctgaagttgggaatccaatgagtccagatatggaaaaggtaaagtcattaaagccttcagaagtgttatctgtgacaacacttgaatatgaattaaagccagtttttgatggtgtgggtatgaaagcaaactttttagatttaacgagtttgaaaaatatgcaaagttctattagcgatttaggtaagaaatatgggcgtgaaaaacaggccgaagcagtagtaactaaattagataaaaaggttgctagcattcaaaaagaagtaaaaggaaagaaagaaccgacagtgcttattttattaggtgtgccgggaagttatttagtagcaacagagcattcttatattggagatttagtgaaacaactaggtggtaaaaatattgtgcaaggtgaacaagtagaatatttagcttctaatacagagtatttaaagaaagctgatccagatattattttacgagcagctcatggtatgcctgatgaagttgtaaaaatgtttgataaagaatttaaaacaaatgatatttggaaacactttgctgcggttaaaaataaccgtgtttacgatttagaagagcgtttatttggaacgacaggtaatttagcagcaattgaagcattagatgaattgaaaaaaatgatgtatccgtgatgcattttaatataaaggaagagtagaatgaataaaaaaacttggagtttcctcattgttactgcattgcttattgttatgacatcattgtcagcgatgaaaggtagtttagaagtaggtattgttgaacttgtacaagggatatttacaggtggaaatgaagatgttgaagtcattaaagatttacgttttccgcgtattattattgcgttgttcactggagcggctctcgctgtttcaggtgtgctttttcaagctgttatgaaaaatccactcgctgatgctggggtaatcggtatatcttcaggagcaagttttatgacactcgttattattacgttgttcccgcaattctttttctggacacccgtattcgcctttttaggtggtgcgcttgcatgttatctcgtttattcgttttcatggaaatcaggattaagcccgcttcgcattattttaattggtattgccattaatgcaatgtttactggattaaatgaatcattcgttacgatttgtggatattttattaagagtattaagcaaacgacgacttctaacataacaatgaagacgtggggcgatgtagaaataatggtgacttatggaacgattggtcttattcttgctctgttcgtaggagcttggtgtaacttattatcgctacaagataagactgcgaaaaacttaggcttgcacgtgacgagagttcgtcttattatttctgccattgcagtactcttagcggcagtatcaacagcgattgcaggtgttattgcttttgtaggattactagttccgcatatttcaagacaattagtcggttcagaccataaagtattaattccattttctgctcttgcaggggcgttattaattttgacggcagatacgattggaaggttaattgtgccacctaacgaaattccagcagcaacaattatggcggttattggtggtccattcttaatattcttgcttggaaagagtgataaagttcatggaaattaaaaatgtaaccttttcatacgataacgtaacaaatcgattaaagtctgttagtagtgaaatagaaattgggaaaattacaacaatcattggaccgaatggatgtgggaaatcaacattacttagtgtcatgtctagaaaccacgctcctagcagtggagaagtaatacttgatgggaaagcgattagtgaatataaaccgaaagagtttgctagaaaactagcggttgtccatcaacaaaatgaggctccagcagatattacagtggaaaagctaataagcttcgggcgtatgccatataaaaatatattctctccgcaaacagatgaagatagagaagcgattgagcgtgcgctagtatgtacgaatttacaaagtaagcgtgataagccaatttatgctttatctggtggagagaggcagcgagtttggatcgcaatgacattagctcaaaatacaccaatgctcttcttagatgagccgaccacatatttagatatttactatcagctagaaatattagagttagtgaaagagttaaatgaagtgcatggactaacgattgtaatggtattacatgatattaatcaagccattcgttatagcgaccatattatcgttatgaaagatggagaaatcattacgaaaggtaatcctaatgatgtaataacagaagaaatgattaaagcaatatatggtgtagatgtcattgtaaagcaggatgaagataccggattgtacatggtacctatgggaatctaaaggctgagcataatccgttttgaggtgataatttgaatagtaagaaaggacggaaaaagaattctttttttcaacgcatacttacaattgtgtttttaggaatctttttctattcaatgtatgagttgggcgggattttcatggattattatgaaaatcgtaaagtaatggctgaggcacaacatatttataaaagaagtccaatggaagaaaaatcagaagatggagaggtacgtaaacagtttcaggatctccagaaaattaatccagagatagtcggatggattacgatggatgatacacaaattaattatccaatcgttcaagcaaaagataatgattactatttatttcgtaattataaaggtgaagatatgagagcgggaagcatttttatggaccatcgtaatgatgtgaaatctcaaaatcgaaatacgattttatatggccatcgtatgaaagacggttctatgtttggtagtttaaaaaagatgttggatgaagacttttttatgtctcatcgtaaattatattacgatacattatttgaaggatacgacgtggaagttttttcagtatacacgacaacaacggacttttattacattgaaacggattttgaaaatgatgcagcatatacatcgttcttaaaggaaattcaagaaaaatcactgtacaaaacggatacggaattgacggctaatgatgaaatcgtaacactttctacttgtgactatgcgcttgatccagaggctggaaggctagttgtacacgcaaaattaataaaaagaaattaaagaaaaaagtatagaatatgagaagtgatagataacgcttctcatattctatactttaaaaaaggactgtttttactgtgctgcagccattggcatacgtacaacttttacatcatagtaagcaattttattatcaagaatatattctggcattccgccttgatgtgagtgagcatctttaaatgcagcgctctttgtccaaccttggaaatcttcttttgcattccagcgagtgctaattgttacttcatcataatcaactgtattttgcgttaaaagaacttctagacctaaaaagcctggcatcgtttcaactttacctactttattaaaacgctcaattaatttatatccatttccctttgtaattttagctgtatttgtaacgataatcatgtttattcctcctataaatatagcctttattttcgagaactcatatacattaaatgataatgaaaatcattatcattgtcaatgctaaatgtgaaatataaaagttttttatattatattggacagtaagatttccagttcaaaatgtagtaaatatgtggcagttaagcgagagaatgagcgagttgtactagcaaagcaataatatggtatagtgaaacgaggctgttttttcagtctcgttttttaaatgcttcctgtagagaaagcatgcaaatggaaaggaagttattatatgcgatcagaagtaactgtaaaaataaaaccgaaatttataaaagaaattaaaagtggatatccgcttattttaaaagatgcgattcaaaatttaaatgatgttcgtgaagaaggaacaatcattaaagtagtagatgagaagaaccaatttatcggaaaaggctattatggaaaacaaaataaagggtacggctggattttaacgagaaaagagagtgaacaaattaatcaatctttctttgaaagtaaaatcaaatctgccttacataaacgaaagcaattttacaaatcaagtgatacgacagcattccgtgtggtgaatggtgaaggtgatggtcttggaggactaattatcgattattatgatggctattatgtagtaagttggtatagtgaagggatttatactttcagagatgagattatagccgctcttcaaaaagtagcaaactttaaaggtatttatgagaaaaagcgttttgatacgaaagggaaatatattgagggggatgatttcgtagcaggagagcgcggcgagttcccacttatcgtaaaagaaaatggtgtaaactttgcggtgtatttaaatgatggggcaatggttggggtatttttagatcaacgtaacgttcgaaaacaaattcgtgataaatatgcaaaaggaagaacagtgttaaatatgttctcttatacaggtgctttctctgtatttgcagcgcttggcggagcgagtaaaacgacgagtgttgaccttgcaaatcgtagtttaagtaaaacgattgagcagtttagtgtaaatgaagttgattatgaagcgcaagatattattgtagaagatgtatttctttacttcaaatatgcagcgaagaaaaaaatgaaatttgatatggtcgtacttgaccctccaagctttgcacgctcaaaaaaatatacatttagtgcagcaaaagattataaaaatttattaaaagaaacaattgctattacagaaaataacggtattatcgttgcttctacaaattgtagcgcattcgatatgaaaaagtttaaaggctttatcgatacagcctttaaagaaatgaatggcaaatataaaatattagaagaacattctttaccagaagatttccgtaccattgatcaatttaaagaaggagactacttaaaagtagttttcatcgagaaaattaaaggttaataaagaaaaggagctcgagtttacttgagctccttttcttattgaacgatattttgtactctaccgacttgcccgtcctgcaatcgcactttaatgccatgcggatgggaaggggagtttgttaaaatatcttttacaattccacgtgttaatttgcctgttcgttgatcttgttttaatacaatatcaacttcaagaccgggggcgatattagaacgtttttgtccgttcatttatacacctgtacgtctacgttggttgtttgttttctttgtttgttggttttgtaatttttttgtttcttggctttgattttttgcattttgaccatttccatttccttgctttttcttagcaagttgttcacgcattaaatcagctaagcttacttttttgttttctgacatgataagtctcctttatataaagttaattatgaacaatcgtagtgaatttcatcatatcattgttaaggaaggaagggaagttggtttgaaaattcatataattgtttccagtctgtagtagttacgatacaattggattgttaacgtttgtaaaaaggggatagacatatgtcacatcatattttattagttgaagatgatatctcaattcaagagatggtggaaaagtatttaataaaggaaggctttcaagttacgattgcgtctgatggagaagaaggcgtgaacacatatttaaaaggttcatttgatttgattatccttgacattatgatgccaaagctagatggcttagaggttgtacgaatcattcgagaaaaaagtgcagttccgattttaatgatgtcggcaaaagatacagatgttgataaagctgttggattaggacttggagcagatgattacatttgtaagccgttttctatgattgaattggctgcacgtgtaaaagcaggtattcggaggtctacgaaatactcggctacagaaacaatagaaaaaatgattcaaattggtgatttaacaattgatccaattaattttactgtagaaaaaaacgggaagcctctcaaacttactttaaaagaatttgagattttaaagctattcgtaaagaaccaaaatcgtgtatttacgaaagcgcaaatatatacgttagtttggaatgaagagtattacggtgacgataacgttattaatgttcatatgagaagattgcgtgagaaaatcgaaagtgatccatctaatccagaatatattaaaacgctatggggcatcggctataagctggaagtgatgtaatatgatcaatttgttaataggtattatttttatattgttatgtgttatttatatgcaatataaaatgagaaaaaatagtagtaaaaatttacgatacacatatgaaaagttagaaagtattgtaaatgaaaaaacaggtgagacgttactcgttatgacagatgatctagaattgcaaaaattattagtggcgattaatcaattattagatgcaaaacagaaaacgaatgcagatcatgcaaaagtagaaatttcgatgagaaaaatgctttcaaatatttcgcatgacttgaaaacaccactaacagttattcttggatatacagaaatgttaaataaggataaaacgataaataaagaagaacaacaaatattacttgagaaagtgcatacgaaaacactagaagtgatggaattaattcataagttttttgatttagcgaaattagaatctggtgacaaagcaattgaaatgacaaaaataaatatgaatgaagtttgccgcgagaagattttatcattttatgatttagtgacgacgaaaggttttcaggttcatattgatataccagaaagaaatatatatgcacttggaaatgtagaagtattaggtagggtattgaataatttaatatcaaatgcaattacatatggagacgatggaaaggcactcggtatgacgttaagagatgatgacacgggcgtgtatatagatgtatgggataaaggaaaagggattgatgaatctcatattgataaagtgtttgagcgtatgtacacacttgaagattcaagaaatagattgtaccaaggaagcggtctaggattaacgattacgaaacggcttgtggaagcgatggacggaaaaattcatctttctagtaaaccgtatgaaaaaacaatttttacaattgcattaataaagatacagttttagcttgtagagcagtagattctacaagctttttttcagcgtaaggaatttgtaagaaacgggtaagaaaaaagagatttccgttgtctattatagaaatatagagtattgcgaaaggggaaagtaacatgacatatatattaaaaacaaaccagttaacgaaggtgtttaaagggaaagaagttatttccggtgttaacatgcatgtgaaaaaaggagaaatttacggttttttaggaccaaacggtgctggtaaaacaacgattatgaaaatgattacaaatttaataaaaccgacgagtggtgatattgaaatcttcggtgagaaattaacagatacatcttatgaagtattaaaaagaatggggacaattattgaatacccaatcttttatgataaattaacggcgaaagaaaacttagacctacattgtgaatacatgggctactacgataaaaatgcaattgaccatgctttacatttagtgaaactacaaggggtagataataaaaaagtaaaagatttttcattaggaatgaaacaacgactcggtattgcaagagcaatcgtgacaaagccagaattgctcattttagatgaaccaattaacggtttagatccaattggtattaaagagttacgagacttatttaaaatgctctgcaaagaatatggcattacattattagtttctagtcatattttaggtgaaatggaactaatggccgatacaattggtgtgattcaaaatggaaaactaataaaagaagtttcaatgaagagtattaacggaaaacaaacagagtacattgaaatcactgttcctgatgtgaaacgtgcagcttatattttagaagataaacttggtataaaaaactacaaaataatgagtggaaccatgattcgtgtgtatgatacgttagcgtctcagcaggccatttcaaaagcacttattatgaacgatgtggaaattgaaagtattaataagaaacatagttccttagaagaatatttcttaaatgtaatggatggagagggcattcatgcttaatggattgttagtgaatctactaagtggattgatcgtaatgttcataagtgggattttatattatagaaaacctgagcggaaatggttgttaattctaatagtaataggaatgttaagcttcgttactgctggaattagaatgttagcagcataaagacagttatataaagaatggaggagtggtttgtatgcttagattaatgaagctcgaatggaagaaacataaattatctagttactttaaaggggtagcaatttgtattatagcaattttcgctgcagtaagccttatggcgttgggaatgaaagccgagggagacgtgctcttctttgacttcacgcaacaaatggttttaataaacacttttattaggataacattcattatttttagttcggtcattttatcacgtttagtaattgatgagtataagaacaaaacgatgcaattatcgtttatgtacccgctgcaaaggaaaatgctaatgagggcgaaattaacaattgttttttgtttttgttttgtgagcacgattatcgctactttcagtatcagtttgcttgtatattttgtgagtccaatgatgggactgattgaaacaccagctacgataggtgaaataatatctatcgttccaactacttttataagtgcatttatgatatctggtataagtttaattcctttattttttgggatgagaaagaaatcgacacccacaacaattacttctgcagtaataatcggaatgctaattagtagtaactttggtcctggaaacggtcaagtaagtctgtttaattttatagctatcccaatagtgctctgtttattaggaattttcatcagttatctttcatatcgtaaaatcgataagattgatgtggtgtgaagcaagcttaaaacaacaatgaactggggtatgaatggtgaaaaagataatagtaattgcaatattattcattacaattgctagtgtagtttttggtattaaggtatttcaggggaaagattttaagaaagaaaagtcttttgagataaataatataaaagaaatagaagtagataatgaaaactggaatcttgaatttaaaagtacagacgctaataaaatagtaattttcgctcaaggtgaacaagcagataaagagatagatcctgtcaaaatagaaaatgatgaaaataaaattgtgattaagcaaaaacaaaagatgaacagattttttaatggtttcacgtttaggaagaaaaatagtatatctatagctattccgaagaaagaaatagataaaattgtagtaaataataaatcgggtgatgtgaaaataagagatatagtagtaaaaaatatcatgacaaaaggcaagtctggagatgaaatgattacaggactatcagccgagaaaggtgaatttatatcgcaaagtggagagttagttttaaaaggtagttcagtacaagaattaaatataaagtctacgactggtgataactatataacaaatgtaagtaactcaaatatgaacatcacatcaacatctggggaagtattactgaaagatatgacagaaggaaaatcattatttatagaaacaaaatcaggtgatattggcgtacggtataaaggtgtccctgcatcattgaagcttatggctaaaagtaattcggctgacgtaatagtggatttaaaaggacttaagaaagataaaaatacagacaaaataaaagtaggaacgattggtgatgcaaaaaatgaagcgaagattttaagtgaaacaggagtcatttatattgattaagtccaaggaggaaggaggaatatcatgctacgtcttatgaagttagaattgaagaaatttaagtttggatggtatgtgaggggagcagttattgcaaatattattatactggcattattaatctttgttagtttcattgcacaaatagaaggagatccagaaataagagatccgcagatgattttgttaatggctagtacagtagtaagagcaacatttattatttttggtagtgtattaatagcaaggttaataattgacgaatataaaaataaaacaatactactcatgttttcttatcccattaatcgaaagaaaatgatggctagtaagttggctattacagcgatagtaacatttataacagttattgtatctaacattttagtagtaggaattttctttgggatagatagttgtttttcaattcttcctcattcattcacagtagatcaattggtgcaagaaggaataaaactagttcctttagccattgcaactgcggggatgagtttaatcccattatatttcggaatgcgtaaacgttcagtgccaactacaattgtttcatctcttatcgttgtagcaattgcaatgaataccaacccagagtttcctacagcaactttacttccccttcaactagcactcgcagcaattggagctgtgattgcatattacggaattaaaaatatagagaaggaagatataacagtttgacaagaataaataaaaaaagagttggcgttacaccaactctttttttgtatatgtatgcttcggtactactctgtaaatttatagtgtttacttaaatactcttgcactcctggagaaatgttaaagttattaggacttttatattcgatagtaaactctccgtctccacttgtttcaaaggcgattgcatagctattcattttagcatcgtaagaagtgtttttgacttctgcatctagattaaaatattttgtaatatattcttttgattccgtaattgctgcttgttttccccaaggggtaccataataggtgaaataaagagatacactaataactccaataatagaagttaataaaatagtgcccatagctatttttttattctttgtattcaatttggttactcctcttcatagtatgtattcattttaacctatcttttccataaaacaactattaagaaaaaatagtttcacatgaaacaagttacagaaaaagacaagatatgtaaacatcttgtcttttttgtcgttacattttaggagcttccattccagccgcagcccattcttcttttgcggggccatatacgccaggaactgttaagccagcttgtcgcattaaaaccgtcatttgtccgcggtggtgattttgatgattaatgagtgtcattaaaaatatagaattcggcatagggcgaccaaagaagtcattaatagtagctaagtctttatcagtccatttactttgaagtgtttcaacaaaagccgcgtttactttacggtattcatctgcaattgtttttgcagaagttggaacaggataatctttcgtttctccttcaaactttagccctgtgccagatagtatcacaggaactgccgtcacgatgtgccaagcaattcttcctaacgtccagtgcccaggtgcaatttcctgtgataaagatgcatcggttaatgaatcaagcattttctgagtagactcagcctcgtatgtccatgattgtaaaaagccttcaattgtttggtacatagttatccctcctatttttgttcatagattaaattcgtgagagataatataatccctgttccacaagaaataattaattaagcattgctacaatatgaaaacaattagaaaatatttgtaaaagtgtcaggaaacgaatgtgctcattcgtatatataatgaataaagaatgggataaagagtggtgataagggtgaaggatatagaaatagtagaaggtcttcgaaaacaagatatgttagcattacatacagcgattgatcgatatggagatttaatttataaggtagttcatagtattttagatacggcacatagtaaggtgttagtggatgaatgtgttgacgatattttattaatcgtttggtacaacattagtagttatgatgaaaatcgtgggaagtttagaaactggcttatatctgtcgctaagtttaaagccattgattataaacgaaaaagtaataaggcttatcaattacaagagtttcagcaagaaagatatgaagatagaaaaaatgtcaatttaacaaaagaagagagagattataatttttacgttttaattaaagaattgaatgaagaagataagaaaatttttataaaaaggtatttagatgaatatagcgtacaagaaatagcgcttgaattcggtatgacacgagatacggtatatagcaggctgtcaagagggagaaagaaattgaagaagctgttgggggggaaaagcaatgaataaagaaaagttacttcaggaattaaataacttacagtatagcgataattttgtagatgattatagaaatgatgagaaaatagataaaacgaaaatagatcgtacaaaagaaactgtaaccaaaacaattttaatgaaacgttgttatgaggttgtacaagaagagttacagggaagcgaagagattttatatagtatgcttgccgaaaatcatcatgtgaaaaattggcagacaggcacagccatgacattaggggtaggcgttcttgcaatgaacttcggtattaataatgtgttaatcgttacaaataaacggttgtatgtgttttttatggatcgttattataatgaagttgatttaaaggtatgtgtattgaatgaagtagcttatatgaaaacaatattagaccgtaaaggtggaagcgagtttctgcatataaagtataaaaatgataaggaatacgtattattgggaaatgctgatgattacagagagttatttcaaatagtaggtaggttgaaaatagcaaatggaatagaattgagattacaagataagaaattaaagagaaagttaactttaaaacgaagtgtattcaatataatcatgtatttacttgttatatatattatgtacaaagcctatattaattttctgccataataggaaaagacggcttcacatatatgaagccgtcttttaattaactttcttcccacttttcctcatcaaccataagaaataaggtgttccaagtatagcaacttttttcgccggtttatctaattttgtttccccttcagtatgtttaattgttatagtttgctttttatcttctatcgttgttacctttttctcctcttttttgctgtccgcattcaacagcgaatagaagaacaaccatgaaaatactaagaattttcttcatcttctttcccaaaataagttttttattcgtaattatatttttaaaattttgctgaaaaataacgaattatacgaatatcgttatgtaagattaaaatccatatgtgtatgaagaatttagaaaaggaatttcatttaactagagaggcgaaagtacaagcaaaaggagatagtatcgcatgtaataattattagaatgtacgggataaatctatatttatctccactgaataaagctttcggtctgatttgataaatgttttttaatttcttacttgtacttataagattgaatttgaaggaaggaatcaacatgtcttcatggctcaataatacaaatggatattgtagttgtaataatcaaaatggtgtacatgttgattcgtgttgttttagttgtgatgggacagtccctaagcttggtccaacaggtccaacgggagcaacgggttcaacaggagcaacgggttcaacaggtccaaccggagcgacaggttcaacaggtccgacgggagcaacgggagcaacaggagcaacgggttcaacaggatcaacaggtccgacgggatcaacaggtccgacgggatcaacaggtccaacgggttcaacaggtccgacgggatcaacaggtccaacgggagcaacgggttcaaccggttcaacaggtccaacaggtccaacaggtccaacgggatcaacaggtccaacgggagcaacaggtccaacgggagcaacaggtccgacgggttcaacaggtccgacgggatcaacaggtccaacgggttcaacaggtccaacaggatcgacgggatcaacaggtccaacgggttcaaccggtccgacgggttcaacaggttcaaccggagcgacaggttcaacaggttcaacaggtccgacgggagcaacaggtccaacaggatcaacgggagcaacaggtccaacgggagcgacaggttcaacaggttcaacaggttcaacaggtccaacgggagcgacaggctcaacgggagtaacaggtccaacgggagcaacgggatcaacaggagcaacaggtccaacgggttcaacaggctcaacaggtccaacgggagcaacaggtccgacgggagcaacaggtccaacgggatcaacgggttcaaccggttcaacgggttcaaccggtccaacgggagcaacaggtccgacgggttcaacaggtccaataggagcaacaggtccaacgggagcaacaggtccgacgggttcaacaggtccaacaggagcgacaggatcaacaggtccgacgggagcaacaggtccaacaggatcaacgggagcaacaggttcaacaggatcgacgggagcaacaggtccaacgggagcaacaggtccgacgggttcaacaggtccgacgggatcaacaggtccaacgggttcaacaggtccaacaggatcgacgggatcaacaggtccaacgggttcaaccggtccgacgggttcaacaggttcaaccggagcgacaggttcaacaggttcaacaggtccgacgggagcaacaggtccaacaggatcaacgggagcaacaggtccaacgggagcgacaggttcaacaggttcaacaggttcaacaggtccaacgggagcgacaggctcaacgggagtaacaggtccaacgggagcaacgggatcaacaggagcaacaggtccaacgggttcaacaggctcaacaggtccaacgggagcaacaggtccgacgggagcaacaggtccaacgggatcaacgggttcaaccggttcaacgggttcaaccggtccaacgggagcaacaggtccgacgggttcaacaggtccaataggagcaacaggtccaacgggagcaacaggtccgacgggttcaacaggtccaacaggagcgacaggatcaacaggtccgacgggagcaacaggtccaacaggatcaacgggagcaacaggttcaacaggatcgacgggatcaacaggtccaacgggatcaacgggttcaaccggttcaacaggtccaacaggatcaacgggatcaacaggtccgacgggatcaacaggtccaacgggatcaacgggttcaacaggatcaacaggtccgacgggagcaacaggtccaacgggatcaacgggttcaacaggtccaaccggagcaacaggtacaagtatcacggcgacatatgcatttgcaaataatacgtcgggaacagcgatatctgtagttcttggtggaacgaatgtcccgcttccaaataatcaaaacatcggtccaggaattactgtttctggtggaaacacagtatttacggttgcaaatgctggtaattattatatttcatatacaattaatataacggcttcattattagtcagttcacggattacaattaatggaggggcacttgctgggacgattaatgctcctgcggtagcaaccacatcatttagtgcaacaatcattacaactcttgcagcaggagatgctattagcttgcaattatttggtttgttagctgtcgcaacattatcaacaactactccaggagcagtgttaacgataataagattaagttaaactataactctcttactcttttaagattaagagagtttctacatataataagaagttaatgaagtaaagcatagttatacaaaagtcagaatattatgattgtaacgctatggtgactataatataatgaaaataaccatcatgaatgaacattcatttatttttatgtatttgaagggggaatgaaggtggaaaaaccatggttgaaaagttatccagaggaaattccgagtacgatttcttatgatattcagccgcttcatagatatgtagaacagatggcttctcgctacccagaaaagaaagcgcttcactttttagggaaggatattacgttttcggacttccatgataaggtgaagaggtttgcaaattatcttcaaaagctcggtgtggaaaagggtgatcgagttgctattatgttgccgaattgtccgcaagctgtaattggttattacggcacattacttgcgggaggtatcgtagtacaaacaaatccactgtatacagagagagaattagaatatcagcttcatgactcgggagcaaaagtaattctttgtctcgatttagtgtttccaagagtaacgaatgttcaatctgctacaaaaattgagcatattatcgtaactcgtattgcggactttttaccattccctaaaaatctattgtatccatttgtgcagaaaaaacagtcaaatttagttgtgaaagtatcagagagtgaaacgattcatctttggaattcagtagaaaaagaagtgaatacggatgttgaggagccttgtgatcctgaaaatgatctagctcttttacagtacacaggaggaacaaccggatttccgaaaggcgttatgttaacgcataaaaacctcgtctctaacacgttaatgggagttcaatggttatataattgcaaagaaggagaagaagtcgttcttggggttcttccatttttccacgtgtacggcatgacggctgttatgaatttgagtgttatgcaaggatacaaaatggtccttattccaaagtttgatatgaaaatggtttttgaagcgattaagaagcataaagtgacactatttccaggggcaccaactatttatatcgctcttttaaatagcccacttttaaaagaatacgatatttcttctattcgtgcttgtattagtggatcagcaccactgccagtagaagtacaggaaaagttcgaaacagttacaggtggtaaactagtagagggatatggtttaacagaatcctctccagttacacatagtaattttttatgggaaaagcgagtgccaggtagcattggagttccgtggccagatacagaagcaatcattatgtcacttgagactggtgaggcattaccgccaggagaaataggggaaattgtagtgaaaggtcctcaaattatgaaaggatactggaataagccagaggaaacagcggctgtattgcaagatggctggctccatacaggtgatgttggctacatggatgaagatggatttttctatgtaaaagatcgcaagaaagatatgattgtcgcgagtggatttaatgtgtatcctcgtgaagttgaagaagtattatatgagcatgaaaaagtgcaagaagtagtgacaattggagttccagatccgtaccgaggagagacagttaaagcatttgttgtgttaaaagaaggtacggagtgctctgaggaagaattaaatcagtttgcacgtaaatatttagcggcttataaagtgccgaaagtatatgagtttagagatgaattgccgaaaacgacagtagggaaaattttgcgccgtgttctaatagatgaagagaagagaaagaatgaggatgagcaaacgggctaaggccctttctttttgaaaaaataggattgacacttttctaaatagtcagtattataagaatatgaatgactattcattcagtcatcttcttgaaggggacagtaaagtgaagaaaaatagaccgaaatacaatcaaattattgatgcggcagtcattgtgattgcggagaatgggtaccaccaagcgcaagtttctaaaatcgcaaagcaagctggggtagctgatggcacgatttatttatattttaaaaataaagaagatatattaatatccttattccaagagaagatgggagaatttgtcgaaacaattcgtcaaaaaacagcaggaattgaaagcgctgtatcgaagttattcatgttggtagaaacgcacttcttgctgttgtcgcaaaatgatcctcttgctatcgttacgcaattagagctgaggcagtccaatcaagacttgcgccttaaaataaatgaagtattaaaaggctacttacaagttatggatgagattttagagactggtataaaacaaggtgaatttcaagcagatttaaatgttcgcgtggcaagacaaatgatctttggaacagtggatgaagttgtgaccaattgggtaatgagcgatcataagtatgatctggtcgcactttcaaaaacggtacacgggctacttattgcagcttgtggttatcgtcaataatgggagggatcatgttgaaattcctatctgtaagagttgaagatcatatcgcggtggcgacgttaaatcacgcaccagcgaatgcgatgtcttcacaagttatgcatgacgttactgaattaattgatcaagtggaaaaggatgataacattcgtgttgttgttattcatggtgaaggacgtttcttctcagcgggagcagatattaaagaatttacatctgttactgaagcgaagcaagcaacagaattagcacagcttggacaagttacgtttgagcgtgttgaaaaatgttcaaaaccagttattgcggcaattcatggagcggcactgggcggcggccttgagtttgctatgtcttgccacatgcgctttgcaactgaaagtgcaaaacttggtttacctgaattaacacttggattaattcctggctttgcaggtacacagcgcttaccacgttatgttgggaaagcgaaagcttgtgaaatgatgttaacaagcacaccaattactggtgcagaagcattaaagtggggacttgttaacggattgttctctgaagaatctcttttagatgatacgcttaaagttgcaaaacaaattgctggaaaaagtccagcaacaactcgtgctgtactagagttattgcaaacgacaaaatcgtctcattactatgaaggtgtacaacgtgaatcacagatttttggtgaagtatttacgagtgaagatggaagagaaggtgtagctgcatttttagaaaagcgtaaaccttcatttagtggcaggtagttcaattatttttttaatataaattaacagaaaattaaaattgatagaatctttctgaaaaacaagggggtaaatggaatgaacatctacgtactcatgaaacgaacatttgatacagaagaaaaaatcgtaattaaaaacggtgcaatttacgatggcgaagcggaattcatcatcaacccttacgatgaatatgcaattgaagaagcaattcaagtaagagacgcacaaggtggagaagttacagttgtaacagtcggtggcgaagatagtgagaaagaacttcgtactgcattagcaatgggctgtgataaagctgtattaattaatattgaagatgacgtagaaaatggtgaccagttcacgacagcaaaagtgcttgctgaatatttaaaagataaagatgcagatttaattttaggcggaaacgttgcaattgatggtgcatctggacaagtaggaccacgcgtagctgaagcgttaaatattccgtatgtaacgacaattacaaaacttgaaattgacggtacaaatgtgaagattgagcgtgatgttgaaggtgatacagaagtgattgcaacttcattaccagttttagtaacagcacagcaaggtttaaatgaaccgcgttacccatcgcttccaggtattatgaaagcgaagaaaaagccgctagaagaattagaattagatgatttagatttagaagaagatgatgtggaagcaaagacaaaaacaattgaaatctatttgcctcctaagaaagatgcaggaaaagtgttacaaggcgagctgcaagatcaagtaaaagaacttgtatcgttgctccatacagaagcgaaagtaatctaataaaatacgaaattatatatgcaggagggaaaatctatggctcgtaaagtattagtaatgggtgaagttcgtgatggatcgctacgtaacgtttcttttgaagcggtagcagcagcaaaaacaattgcagaaggcggtgaagtagtaggtcttctaattggagacagcgttgcctcttttgcaaatgaattgattcattacggtgcagatcgcgttgtgacagttgaaaatgataaattaaaatcatatacatctgatggttatgcacaagcgtttttagctgtacatgctgaagaaaatccagaaggtattgtcttgggacatacagcacttggcaaagatttatcaccaaaattagcagcgaagcttgaagctggtttaatttctgacgtaactgctttagaggttgaaggtggaaatgttatcttcactcgtccaatttactctggtaaagcattcgagaagaagattgtaacagacggcatcttatttgcgacagtgcgtccaaataacattgcaactctggaaaaagatgagtctcgcagcggtgacgtatcttctattacagttgatgtgaaagatttacgtacaatcattcaagatgttgtccgtaaaacggcagaaggtgtggatctttctgaagcgaaagttattatcgctggtggacgcggtgtgaagagtgaagaaggttttaaaccattaaaagagttggctgacgtactaggcggcgctgttggggcatctcgtggtgcttgtgacgctgaatactgtgattactcattacaaattggtcaaactggtaaagttgttaccccagacttatacattgcatgtggtatttctggtgcgattcagcatttagcaggtatgtctaactcaaaaataatcgttgcgattaataaagatccagaagcaagtatctttaaagtagctgactacggtattgtcggtgacttattcgaagttgtacctcttttaacagaagagtttaaaaagttaaaagtacattcatgattttagtacccttgagttccaagtgaagtacccctatatatagaaaaaggtgagagatcccctgtctctcatctttttagtatttaatccgtatttttatatagtataaaggaacatttttttgttacaatacataacgatacatattattcgccacgtatataagttaatgatatactcttggtagaatatacttgaaggaggaaataaaatggcaattgtaaacgcaaatgaccaaagcttcgcagctgaaactagcgaaggtgttgtattattagatttctgggcaccttggtgtggaccttgtaaaatgatcgctcctgtattagaggaaatcgatgcagaactaggcgaaaaagtaaaagtagtaaaagtagacgttgatgaaaaccaagaaactgctcgtcaattcgaagtaatgagcattccagctcttttcgtattaaaagacggtaaagtagttgatcaagcgttaggttacaaaccgaaagaagcgttagtagaattagtttctaaacacttctaaaataaaaaaagctaccatttggtagctttttttattttcttttttacagtctttccgttacaataaaagaacgtatgttgggtgtttgggcatagtatgttttcaagggaaaataaaaatgctaagtatgtagaaatggagggagacgagtgcacgaacatttgaaagagaagttggctattttaccagatcaacctggttgttatttgatgaaagataagcaaggaacggttatatatgtcggaaaggcaaaagtgcttaaaaatcgtgtgcgctcgtactttactggttcacatgatgggaaaacactgcggcttgtaggagaaattgttgattttgaatatattgtaacttcttcgaatttagaagcacttattttagagttaaatctaattaaaaaatatgatccgaaatataatattcaattaaaagatgataaaacatatccttttattaaaattacagcggagaagcaacctcgcttactcattactcgaaacgtaaaaaaagataaagggaaatattttggtccttatccaaatgcacaatctgctcatgaaacgaaaaaactgctagatcgtatgtatccacttcggaaatgcacgaatatgccagataaagtttgtttgtattatcatatgggtcaatgtttagcgccttgtgtgaaagaagtgacggaagaacaaaataaagaaattgtagatgaaattattaagtttttaaatggtggacataaagaagttcgttcagaactagaaataaaaatgtatgaggcctcagagaaactagagtttgaacgtgcaaaagagttgcgtgatcaaattgctcatattgatgcgattatggaaaagcaaaagatgattatgagtgacttagtggatcgtgatgtgtttggatatgcagtggataaaggatggatgtgtgttcaagttttcttcgttcgaaaaggaaagctaattgaacgtgatgtttctatgtttccaatttacgatgaaccagaagagggttttttaacgtttatcggccaattttatgaaaacagtagtcattttaagccgaaggaaattgtcgttccaggaagtatagactcggaattagtagagcgctttttagaagtggaagcgacgcagccgaaacgtggtaagaaaaaagaccttgtagaattggcaaataaaaatgcgaagattgctcttgaagagaagttttacttaattgaacgtgatgaagaacgaacgattaaagcggtagatcatttagggaagcagcttgggattgaaacgccatatcgtattgaagcgtttgataactcaaatattcaaggaacaaatcccgtttctgcaatgattgcttttatcgatgggaaaccggcgaagaaagagtatcgaaaatataaaattaaaacggttcaaggaccagatgattatgagtctatgagagaagttgtgaggcgccgttatacaagggcgcttaaagaaaattcacctttacctgatttgattattattgatggaggaaaaggccatctagcggctgcaagtgatattttagagaatgagctcggattatatattccgatggcaggtcttgtaaaagatgataaacataaaacctcccatttaattattggggatccaccggaacctgtgatgcttgagagaaatagccaagaattttatttattgcagcgtattcaagatgaggtgcatcgatttgcgattacattccatcgtcaattacacgggaaatctgttattcaatcagcattggatgatattccaggaatcggtgataaacggaaaaaggtattgttaaaacattttggttcattaaagaagatgaaagaagcttctatagaggaatttgtcgaagcgggtatgccgaaaaatgtcgcggagacgatttatacgtatttaacagataagaagacgttgtagtttacaacgtcttctgttttttggtataatttctgaagatttaaaataaatgcatctgaatgaaaatacaaaaaagtcaactaaactgatatgtctagttgactgtaggtaatgcttacacttcaatgagatcttttatatcccattttacaagaaatgtaatagagtcagaacgttttttcttttcttcgtatgactctgcaacgacgttccgttgcttttggatttgttcagcgatgaatccggcttctagttgataagaagaatgtcgtttttgtttttgacgttctgcgatgagtgtgcctttaagttggaactgcatttcacgacgcttatgttcaacaatgcttaaagtgccccagccagccttttcaaagaactgaatgacttcttcaattgtttctagcggatattttcttgcaaggtttctaccagaccagtataaaataccatctaaatcgttgccgattaaatcaggtagtaattcttcacgtagcaattcataagcgaaggcgttcaatgaaacatcttctaaagatgttgtatcgattgtatttttactcacaatattcccctctttctatagggagtattatataacatttcacatttataaaaacagatttttctttaggaaaatctgaatatataagaagaaaaaaagaattggcaaattatatgcaaattatgtatacgttttcttgacgcttcgacaaaaataggagtaaaatgaacttggtatcaaattatgctgaaatatttcgaataattttttcagtttttcttatgccaatagtgaaaaaacattattgtcataaactaatctgaaaacagcagtcaaacattcaaggggggtaatggggacatgaaaggccgcgagtatacgtttcgtaagtggcactcattaatgggggtcatcccggttggtgtctttttgacgcaacatttaattgtaaacaactttgcaacacgaggagcagaggcttttaacaaagctgcaggctttatggagctccttccattccggtatgcgctagaaattttcatcatctttttaccgatactgtaccatgctatatatggcttatatattgcatttacagctaagaacaatgcggtttcttacggttatttccgtaactggatgttcgttttccaaagaatttcaggtatcgttacgctgatcttcatttcttggcacgtctgggaaactcgtattcaagcaatgttaggtaaagaggtaaactatgatatgatggcagatattttaaacaatccagctatgtttgcattctacttagttggtgttgtttcaacaattttccactttgcaaatggactatggacattctgcatcagctggggaattacagtatctccacgttcacaaagaatctctacttatgtaacattagctattttcttaggtttatcttatgtaggtgtgagtgcattattagcgttcatcgatccacagctagcaaaccagtaaggagtgggagagcatgaaagggaaacttatagtagtcggcggtggcttggctggcttaatggcaacgattaaagcggcagaagcaggagtaaatgttgaactgttttctttagtaccagtaaaacgttcacattctgtatgtgctcagggcggaattaacggtgccgtaaatacgaaaggtgaaggggattctccatggatccactttgacgatacaatttatggtggggacttcttagcgaaccaaccaccagttaaagcaatgtgtgaagcagcacctggtatcattcatttaatggaccgtatgggtgttatgttcaaccgtacggaagaaggacttcttgatttccgtcgatttggtggaacgcaacatcaccgtacagcatttgctggtgcaacaactggacagcaattactttacgcattagatgagcaagtacgtcgtcacgaagtagcaggacttgtaacgaaatatgaaggttgggatttcttacgagctgttgttgatgatgaaggtgtgtgccgaggaatcgttgcacaagacttacaaactatggagattagaagtttcggagcagatgccgtgattatggcaacagggggccctggtatcattttcggaaaatcaacaaactccattatcaatacaggtacagcagcttctgctgtatatcaacaaggcgcatattatgcaaacggtgagttcattcaaattcacccaacggcaattcctggagacgataaattacgtcttatgagtgaatctgcacgtggtgaaggtggacgtgtttggacatataaagatggtaaaccatggtacttcttagaagaaaaatatccggcttacggaaaccttgtacctcgtgacatcgcaacgcgtgaaatctttgatgtttgcgtagagcaaaaactaggtattaacggtgaaaacatggtgtacttagatctttctcataaagatccaaaagaactagatattaaactaggtggaattattgaaatctatgagaaatttacaggggatgatcctcgtaaactaccgatgaaaatcttcccagctgttcactattcaatgggcggactatgggttgattataaacagatgacaaatattccaggtttatttgcagcaggtgagtgtgattattctatgcacggtggtaaccgtcttggtgcaaactcactattatcagcaatttatggtggtatggtagcaggaccaaacgcaattgagtatatgaaaggtctttctaaatcatctgatgctgtttcatctactgtatatgagcaaaatgaattaatcgaaacagagaaatttaacaatattttaacgatggatggtaacgaaaatgcgtatgttcttcataaagagcttggagaatggatgacagataacgttacagtagttcgtgaaaataaaaaattattagaaacagatgcgaaaattgaagaattaatggctcgttacaaacgtattaacattaacgatacagcaagatggagtaaccaaggtgcttcatttacacgccaacttgcaaatatgtttgagttagcacgtgttattacaattggcgcatataaccgtaatgagagccgtggggcgcattacaaacctgaattcccaaatcgtgatgatgcaaacttcttaaaaactacgatggcaaaatttgagggagaaggaaatgcaccagcattccattacgaggacgttgatatttcgttaattaaaccacgtaaacgtgattattcttcaaaacacgatgtagctgctaagggtgaagagaagggggataaacaacatgtctgagaaaacaatccgcttcatcattacgagacaagacgggccagatgcgcaagcgtttgaccaagagtttgaaattccatatcgtccgaatatgaatattatctcagcacttatggaaatccgtcgtaatcctgttgattcaaaagggaaccaaacaactccgattgcatgggatatgaactgcttagaggaagtatgtggtgcatgttcgatggtgattaacggaaaaccacgtcaatcatgtacggcacttatcgatcaattagagcaaccaattcgcttaaaaccgatgaagacattcccggttgtacgtgacttgcaagttgatcgtagtcgcatgtttaatgctctaaaacgcgttaaagcgtggattccaattgatggtacgtatgacctaggtccaggaccaagaatgcctgagaaaaagcgtcaatgggcttatgagctttcaaaatgcatgacatgtggtgtttgcttagaatcatgtccaaacgtaaacagtaagtctgactttattggaccagcaccgttatcacaagctcgcttattcaactcacatccaacgggtgaaatgcataaagcagatcgcttacgtgcaattatgggagatggaggactagcaaactgtggtaactctcaaaactgtgtgcaatcatgtccgaagggtattcctttaacaacttcaattgcggcattaaaccgtgatacaacaattcaatcgttcaaagatttctttggtagcgataataactattaataaatattgcctcttcatatcgaagaggcaatatttataactttatttttctgtttattctgtttatttaaaggtgaaaaggggagataacaatgaagaggatttcttatattgaagactttgagcaatgggaaagtggtttttcgttttacaaccctgtaaaggttcgttttggtgaagtagatatgtttggacatgtaaataatgtcgttgcttttacttattttgaagaagctcgtattgcgttgtttaaagaacttggatttatgcaagagtggacacatgcatcatcagaaacgatgatcgttgttgcggatttacaatgtaattttattaagcaaatatattttgatgaacagctgaaggtgtatgtaaaggcaggatcggtcgggaattcttctttagatttacattatatggtgaagaatgcagcaggagaggtttgtttagtaggtcgtggaatgatggttcaagcgtcgaaaaaaacaggaagaggcgaaccatggcctgaagaatggaagaagaaattactacaataatagagtgaaagaaaaataagagagcaatttgctctcttattttttgtcttccatcgcttcttctaatgttaagtgatgtttatataggtatgtagcgtatggattaccaacgtagcgtaagtgccatggttcatatgcatattctgttgtatctgttttatcttctaagtaacgaatgacaaagccgaattcatgagcgtgttctgcgacccattttccttctgctgtctccccgaagataggctctaattgaaatttagctgattttgaactaatatccattgctaaacccgtttggtgttcacttgtaccaggaattgcgcttaccgaattagcttcggcttttccctggcgtctaacgtatgtatcatgcaacgatttttggcgtttgtatgaacgataaccagatacagctgtaagatcaagcccttcttttttcgcagctttaaacatgttttcaagtgcctctgcagcatcttttcgcagcaatgttttttctttatcttttggactaataaatggtacatttggtctcgttaagtcttcaggaatgtatccatctggtagttttcgatgtttattaattaagacaagattagatttgggatttgttaccactgaaaagtcattgtctattttctttgcattatgatcagcttttggaaaagcaggaatctcttcttttttatggttattatgcttttgactttcgacagcttttgcttcattatgtagtggtgttttagaaccaaagtaagcgaaagatgtgatcccgattacaatagtagtggcagaaataattattatctttttcatgatgccttgtaatcacagtcccttcttaataaaatgtgtaatgtttttttattataaatctagtttgttggaaaaggaatataagagtcataacgtaatagaaatgcaaagaaaatgtcagaaaatgtgtgaatttgtagtatttttttatataattcatttcttatctttcatgaaatgcattttttatgtaatatatatacataagaagatgtagcgattatcgagaatagagaacttcttgtatagactgggagtgaatgggaatggattttgcaacaattattggacttattttaggatttgtagcagtggtagtagggatggtcgtcaagggcgctgacataacagccttattaaatcctgccgcagcattaattatttttatcggtacatttgctgcagtatgtattgcatttccgatgaatcaactaaaaagggttccaaaactatttaaagttctttttggttcaaataaaaaggatttaagttatgaacagttgctagaattatttgttcattggacatctgaaagtagaaaatacggtattttgtctttagagcaacaattagacaaaattcaagatgaatttcttttgcgcggtatgaaatttgtgattgatggcgtatccgcagaagatttggagcagattttggaatctgaattagaggcaattgaagaaagacatgcaaagggagctgctattttttcacaagctggtacgtatgcaccgacattaggagttttaggtgctgttatcggtcttgtagctgcgcttggtaacttaactgatattgaaaagttaggtcatgctatttcgggtgcgtttattgcaacgatttttggtattttttcaggttatgtattatggcatccatttgcaaataagttaaagcaaaaatcttcagctgaaattgagaaaaaacgtttaatcattgattgtttattaatgttacaagaaggtacatatccgtttattatgaagaaccgcattttaggtgcactttctgcaactgagcgtaaaaagctagaaaaaggagcagaaaaaaatgcggagtaagaaaaatagaagaggcaaaaagaaaaaacatgatgagcatatcgatgaaacgtggttaatcccatattctgatatgttaacgttgttatttgcattgtttatcgttttattcgcaatgagtagtatagatgctgcgaagtttaaacagatggcagttgcttttcgaagtgaattagctgggggaacaggtaacaaagaatttttaagtgatcaaaagccaaatgatgaaaaagaattatcagcaagtagccttgaggcagaacaagcaaaaaaacaagaagaagctagagctaaagaaaaaaaagagatggatgaattgaaagcattacaaaaaaagattgatcaatatattaatgaaaaacaattatcctcttcttttcaaactaaattaactgaaaagggattaatggtgacaatattagaaaatatactgtttgattcggggaaagcagatgtgaaattagaatctttagggattgcaaaagagatgtctagcttacttgtttcagcgtcacctcgtgaaattacagtatcgggtcatacggataatgtccctattgccaatgcgcagtttgcgtcgaattgggaattaagtacgcagcgggcagttaattttatgcaagtattactgcaaaataaagaattacaaccagaaaaatttagtgcgattggatacggagaataccgttcaattgctccaaacgatacacaagaaggaaaggcaaagaatagacgtgtggaagtatttatcttgcctttaacagagaaagtaaaataaaagaggatggcgaatgccatcctcttttattttacttcaaatgattttaagttgtcgcgacggattttatctttttctgcatctgattttttgaaatcataatcatataaagcgccttcccaatcgccatacattggattcgggaaaataatgaatttctcaccaaattgtgcttttgaatctgctactgtttggttacgatcttttacagattttccatcaaaacctgtgaaatcagataagttatcaccgaagaataagacaatatcatgagtttgagaaacgagttcacggcgtttttcttttcctttttctttcggatcttgtagtaatatatgttctttcgttgcttgaggagcacctacacgctcaagatttttaattgtcgcatctagttgattcgttttacgatttgagatgtagtaaatatctacacctttagactctgtatattttaagaaatcaattgcgcctggaagggcttcagcctcagctttgttaatccaatcatcccatttgtaaggatagcctttgcctgtttttacgctcattgcttgatgaggactgttatctaaaacagtttcgtctaaatcaagcacgatagcaggttttttctctgtcccttttgcaagaattgtatcaagctttaattgaccaatgttgtacccttggtagtaaagtgctttcgtttcaccggctgtttgataccataaatcagccattaattgttgttctgttaattttactttctcttcttttgccactgttttctctggtgttcctgaacatgctacaagtgatgtagatagaaccgctacagataataaagtggtaatgcccctcttcatcttcatatgtatcctccttgatgttagaaaatcattttatattatatattaaaatataatatttttatatgaacatttgcatattgtcttttgtatatatagtagtatgtcctatattagaaagatgagcaaaataataatagttgttttgacaatttttattgtcgtaatgacaattataattgacaaaaagaactttgttatttacaattttaactaaatagaacaaatgatggattaatgacgatgtttacatataagaggatgaagcgcggtgctatattttgtcttgaataaacatagtctttgaaagagagtacgaatgatactaaaggggaggctttatacttgagtttacaaattcaaaacttaacgaaacaatttggggaatcaaaagcagttaacggtttgcaaatttcgttaccaaaaggtgaagtactagggttacttggacgaaatggtgcagggaaaacaacaacaatcaaaatgcttctcggattattaacgcctaatgaaggttcgattacatgggatggaaaagcatttggaaatagtggtgtaacaattgggtatttaccagaagaaagaggtttatatacaaaaagtagagtaatagatcagctgcgatattttggtagattagaaggaatgtcgaagaaagaagtggatcacgctattgatcactggttagagcgtttagcgataccagaatataaatttaaaacggctggagagctttcaaaagggaatcagcaaaaaatccaattaattgctgctcttcttcataatccggaacttctcattttagatgaaccattcagcggccttgatccagttaatgctgggatgttagctagtattattgaagaacaagtacagagcggaaagacgattattttatcaagtcatcgtatggaacaagtagaggctttttgccaacatgtatgtattttgaaaaaaggtgaagcagtcgtaaaaggacagctaagtgatattaagaaagaatacggtttccgtaatttaacgattgaagatacagtagagaatgaaaagggattagaagctatacatgtatcgtatgaaaaacaacaaggccttctttatgtgaaagtacaagacgatgcggaagctctcaagattttgcaacagttgcaagagcaaggtgttagcttacgacaattcaaaatgttagagccgacgttaaacgaaatctttgtagagagggcgaaataacgatgcgtaaattttctcacgtattttcattttattttagggaagcatttttatctaaaaaatcattaattacgagtgcgattttatttttagttgtgtttgggatttttgcatttaatcattttacttcaggcgatgataaaaataaggataaagataaaattgcagttgtagtagagagttccacatataaagtacaaaaagatgagctaaataagctattgccatcagcaaaaataacaattggttcaaaggatgattttgataaactgcataagcaagtagaagaaggcgatttagatggtctattccatgtgacggaaaaggatggggctccatcgattacatatatgtataatggatttccaagccaagcaacttctgcaattatggcaggatatttaaagcaacaatatacgatggtgacgattgccaaaaataatgtttcaccagaaattgcacagcaattacaaacagaaattcaagtaaagcaagaagcgataaaagatcgtacatcttctttcggaattgcctatttctttacatttgctttatatatgtttattgtagcgttcggaaatacaatcgcaatgaatattgcatctgaaaaggcgtcacgtgtaatggaagtaatgcttccgaaagtgaagcctcttacgatgatgtatgcgaaaattttagcggttgtttcaacggcgttattgcaacttgtcatattggcgtgtggttatcttattccatatttgttaggttgggtcgatttagaaagtgcctcactacttggtattccaattgactttacgaaattagatgcaaaggttatcagcatgtttcttgtttatttcattacgggatatttactttatgcgatgatgtatgctgctgctggagctgtcgtgtctaagacggaggatttacaagctgtatctttcccggtaatgattttaattatggctgcattctttattagtattaaatcattaagtgatccgaatagtactatcgtcgttgtaaattcttacgttcccttttttacaccgatggttaccttctcacgtattgtagctggtgaagcaggtatgctagaaattacgataacattagcagtcttattggcgacaattgcggtattaaatgctgttacaagccgcatttacgtaaacggcgtaatgaattactcagataaagtgaaatttaaagatttagcgaaatttataaagcgtcaataatgagagaaaagcatgatttcctattgaaatcatgctttttctttatgtataaattaaaaatagtatataatgataagagtcgtcttttaatagaatgaataaaaaggagggtgtgcagatggggattagtagtcgttttacagtaggtgttcatatgctgacattacttgcgatagatcgaaactctcgctgtacctctgaatggattgccggtagtgtgaatacaaatccagttgtgattcgtcgcattacaggaatgttgaagagagcaggacttgttgatgtacaagctggtaaaggtggtacgacacttgctcgagatttagaagaaattacattacttgatgtatataaagcagtggaagttgtagaagaaggacagctattttccttccatgaaaatcccaacattgaatgtccagtaggagctaatattcaatcagtattagaaattattttaatgcaagcgcaagaagcgatggaaaacgtacttgcaaatgtaacggtagatcaattagttacaaatttaaagtctaaaatgaaagaataaaaaaaagcgagcttcctcataatgagggctcgcctttttttattcagaaatattgaaaattctatttttcagtatttaaaatgaatttacctacgatagctgcgaagataccaccaagaattggtgctacgatgaatacccatagttgagaaagtgcttctccaccaacaaataaagctggtgcgatactacgagctgggttaacagatgttccagttaacggaattcctaataagtgaattaaaactaatgtgaaaccaattactagtccagctaaagaagaacttccttttttacctgttacagcaacgataactaaaataaatacgaaagttaaaatgaactcaactaaaaatgctccagataaaccaagagttccgaaaccattttgtcctaaattatctaaaggtgttttagcagattttaaaattgttactaacgttgcagttcctaataaaccacctaaaatttgagctaatacataataacaaagttccatagcgttcattcgtttgttgatgaacatagctactgatactgctgggttaatgtgacatccagaaattgttccgatgctatatgccatagctacaatagatagaccgaaagccatagcgattcctaatgttccaattccttcaattccgccgccagtgacggctactccagttccgaataatacaagtacaaatgtaccaataaattcagcgattgctttttttaacataatttacctcctattaatgcgcatgaaacgtattataacataagttttagtataaagagccaatgaaatactattctgataaggcgaaatagggggacaataaaaaagagtatggttcatctctatagaaccatactctttttttatgctgattttttctgtttaacgactggaacagaacggtttaaaatactatttgcaaccattcctaacatgataataatcattccgatgagagaaagtcctccagggagtgaaccatttaagaaaatgatttcaccaagcacggtaaagaccatcgttccagcttgtgttgcttcaacagctccaagtagagagaggttatcttttgctaagtcagtagcaaagaaaaatgtcatcgttgcaataacaccggaacataatgctaacagaaatccttgaagcatttggttggatgttggaatgccagtagtagaaaatccgtatataccaagcaagattgttataggaagacttccaattgccattcctaatacacgttggaacgtatcaaggcgtccaccaacaagctccatcatttttcggttaccgaacggatataagaaagcggctaatacgacaggtaaaaaacctgaaatgaactgagtcattgtaatatggcctgcggcagttgtttgcatacaaattacaccaagtaaaataaataatgcaacatataagctacgaagtggaatttttccacgtacaagtttcgtacctgattttgtttctattttcacgaaaaatagtggtgatagtagtaaaccagctaaaatcgtaacttgccaagttccagcaacgagccaagctggagaaaagacagctgcgaaacttaataaagaataaaaaccaataccggcaacagaaccccatccgatccatgccaatggatgtttttttaactcttcccataatcccctaaagtttttgcgaaataaaacgataaggaataaaataggaagagcaaataaaaaacggaaggaagctgtccaagcccagctcgttccagatacattcattgctctattaataataaaggttgcagaaaaaaaggccgatgataaaagacctaataaaattgcgcgcatgaagtataacactcctttcgaaaataaataattatgtatagtatgatatacttttaattattaaaagtaaactattttatactttaaggtggttttatatatgaaagaaaatgaagatatgcaaacgaaagaagtcattcaacaagttggacagttattgagacaaattcgaaatgaacagaaattaagtttagaagaattagctcataaaacaggagttagtaaattaacattaggaaagatcgaaagaggggaaacaaatccgacactagctgtcatttggaaaataacgaaagggttatcaattcctttatccagattaatggttgttggagaacctgtagctgttgcgcgctgtggagaaggatttgcagtagatgaaggacaagcgtggcatttagaaacgatgttccgttatacgaaagaaacagggatggaaatgcaccgtgcttgtttacgatcaaatagtatatatgagccagaagctcatcatgaaggtgcgattgagcttgtaacggtaatgaaagggaaagtgtctattcaagtggagaatgatgtatacgaattaaatgagtttgattccattcaatttgaagcgaataagaagcatatttataaaaatgaagaagaagaagtagcggtattacatttaacgatgaaatattcttcatgaaaaaatcacctataggattctataggtgatttgctcttcttaagtatgtgaaataatgccgttagtacgaacgtggcataagtaataaacaaatgaaataaactaaaaatcctgtcccaaaacataaaacagcaataacccaaatgatacgaataagagtagagctaatatcaaaatattctcctaaaccaccacatataccaaatagcattttatcagtttcggatttacataacttttttgacatattccaatcaactcctttttatatcaaactgcatacttttattctatatggaaatttatgagaagactatggggttgtattacatttttttgtgagaagtgatcgtattaattgtcttaattttcagtggatattaaaattgtagttatgaggtgatttttaataaagggtggggaaatagagatgacagtatattggttggctaacgtaatgcttgaatcaggatatacatatgaagaagagagaatttcaaaaacagaaacagaattatgcagtttacttattgaagatggtcgaattaaaaaaattataaaagggattgttcaagaggaagatatagtaacttttgatgctaagaacttattaatgttgccagctttcaaagagatgcacattcacattgataaaacatattatagtggcccatggaaagcttgtatgccagcagaaagtatttttacacgttttaatgaagaagaaaaaattttaccaaagcaattagcgactgcccgaaatagagcggaaaatatgctagagttactactgcaaaatggtgcaacgaatattagaacgcattgtaatgtcgatccgattattgggcttggtaatctggaggcgacgttagcggcattagaaacatataaaaatcgagtgtctagtagaattgttgcgtttccgcaacatggattattgcgcagtgattctgtgcaactcgtgaaagatgcgatgcgtatgggtgctcatctagtcggaggagtagatccagctacagtagataatgacattgaaaagtcattacatacaattatggatatcgcagtagaatttaatgcggatgttgatattcatttgcacgatgcgaataatcttggaacgtttacgatgaagagattggcaagtttaacagaagaagcaggatggcaaggccgtgtaacgattagtcatgcacttggacttggtggtgttactggtaaagaggctgaagaagtggcagaaagactcgcaaatgtaaatattgatattacttcaacagtgccaattggtaaacaagtaatcccaattccgttattagataaaaaaggtgttaaggttgcattaggcaatgatagcattacagatcattggtcaccgtttggaacaggtgatatgcttcaaaaggcgaatcgattagcagagcgttttgggtggagtgacgaaaggtctttaggaaaagcactccgctttattacagggggaaaagaaacgttaaataatgaagggaagcgagtatggccgaatgtaggggatgaagcgagctttgttttgacgaatgcgacatgcgctgctgaagcagtagcgcgtcaaacagaaaaacgtttagtcgtgtataaaggaaatattgttgttggaagtttaaatgaggtggaattaaataatcttgtgtagaagaatcgtttaaatattttgaggagggttctaatggtgagtatagaactcttcttttttattcttacaatatatttttataggaaagctagaagggatgaaaaaattggacaatcaacataaccaaaatcatattatgggaactttgcaatggtttatatttttattagcaaattcaatagcactaccaattgtcgttggcggattatttcatcttacgacggaagaaatattttatttaatgcagcgtacgttttttgtagttggtatatcttcttttttacaagggtggcttgggcatagactgccaattgcggatgggctggctggatcttgggttggtgtatttaccgtacttgcttatgcaacggccggacaggatcaattacatagtacactgcaaattttagaattaggaatgataatctccggtgttattttaataggattaggagtaactggttttataggacgtattttatttttatttacgccgcttgtgacagggacgtttttacttttattatgtttacaattaagtggtgtatttttaaaaggaatgttaggaattacagctactatttctcaaatcgacggatttacagcaatgatcgcgtttagtatatttctgttcgttattatactatctaattttggaaaaggctttgtcaaaagttatgcagttttaataggattaattagtgggtggattatttttctcattgcaggaaaagtgacaatcccatctcaagtaactcattttgtgcaacttccacatatatttgcttggggacttccaaaatggaatacaggtatggctgtatcaagtttcgttatggtatgtattttagtttcgaatacggtggcagctattatagcaattaatcaagcaactattcataaagcgactattgaacaaaaacagttgaaagatggaacatgggttggggggatttcgcatctcatctcttctgtattttcaactgtaggtgtcgttccgttaccagcaacggcaggattcatacgtttaacaaaacaaaagtatatacgatcgttcttaatggcatgtgcgttactagtcgtaatgtctctttttccaagtattattcgttacttagcatctttaccatcagctgtcgcatcggctgttttaatggcttcgttcgtacagttaattggaattggatttaataatataaaacaagtgccgatgagtgaaaggaatgtaacgatcttaggcgttgcagtattatttggcagcggcgttatgtttttaccgtctggagcactccaatccttgccgtctgttatgcaatatatattcggtaatggtttatttgtaggtacggttgtaagtatattgctagaacaaatatggcgcgttggaaagtaagtggataaaaagagtgtacgcactgtataaaagtctaaaataacataggaaataaagcccattttcattcaccacctgcacatttcgttcatacaatatcttgactaaataaacacccaacttacacatacacagctctggcttaagcaaggagggttataccagttgaaggaaaaagcgtatcaatctaaacctttactcacaaagagagagagagaagtatttgaattgctggttcaagataaaacaacgaaggaaattgcaggtgaactttttataagtgaaaagacagttcgcaaccatatctcaaacgcaatgcaaaagctaggggttaaaggacgttcacaagcagttgtggagcttcttcgtatgggagagctcgaattataagaaagcagccgacttttatataaaagtcggctattttttgtttgcttcacttgctatatgaatgataagaacactccatacataaataggtaataagacctgcggtagtatgtcaactgaaaaacaaaagaatttttagttatcaaaggtggggaatgtcttataaattagggaggaacaacttcaatacatatactataaaaggtaggtgtgactctcatgtgaacatagggtgaaagagagagggagttttaaataaaagatagaaagacaaaaaaataagaccatcatttataagatggtcaaggaaggggacaatttatgtcaatttaattagggatggaagctgttcaaagacactggggaatgtcttataaattagggaggaacaacttcgatacatatactataaaaggtagatgtgacctctgtgtgaacatagagtgaaagagagtggaagttttaaataaaagatagaaagacaaaaaataagaccatcatttataagatggtcaaggaaggggacaatttatgtcaatttaattagggatggaagctgctttaagacactggggaatgtcttataaattagggaggaacaacttcaatacatatactataaaagatagatgtgacctctgtgtgaatatagagtgaaagagagagggagttttaaataaaatgaaaatttaatgagtgttttttgttcatcccctgttgattattagccttaaccaatcgggcgtttattgcccacaaatagcggaataaaagataaagcaaacaaaaaataagaccatcatttataagatggtcaagggaaggggacaatttatgtcaatttaattagggatggaagctattcaaagacactggggaatgtcttataaattagggaggaacagcttcgatacatatactataaaaggtggatgtgacctctatgtgaacatagagtgaaagatatggggatttgaacaatagtacatatgaaattgttattgctagcaatatagaattaggatatagagttttccaacataaaacgaaaaggaatctgaatataaataaaagttgtaatctatgaaaaaaaagattatgctcaactatattatgagaatataaggtttgtcccaattatttaagggcttttaaaaagctttttattgtatgaggggaagcttcactttaataagggagttaatgatatggacgtaacaaaaaaacaagggctgtataatcgtcttatacgattaaacccaccacaaatattagcattaggctttttctgcttaattgtggttggcggtttgttattaaaattaccattcgcaacgaaagcacatattagttgggtagatgctttctttacagcaacgtcagcagcgaccgtaactggtttgggagtagtggatacagcaagtacatttacgatgtttggcgaaattgttattatgtttttaattcaaacaggtggtctaggtcttatgacaattgccattttaattgtttgggtactaggtaaaaaaatcggattacgccatcgtttattaattggagaagcatttaatcaaacaaatataggtggtcttgtaaaattagtaaagcgtgtctttatattttcgatttgtattgaacttattggggtcatctttttatcgtttcgctttattccagagtttggttttggaaaaggtttatactatagtatttttcatgtaattgcatcttataataatgcaggatttgctttatggccagataatttaacaagatatgtaggggatcccattattaatattgggatttgctctttaattgtaatcggaggactcggttttaccgtattaattgatatatggtatagtcgcagttttcgaaaattatcacttcactcaaaaataatgattattggaacagtagtgctaaatgttatagcaatgattgtgatttttgtattggaatataataatgtgaagacgttagggaatttatctttaaatgaaaaactatgggcttccttctttcaaggtattactccgcggacagctggatttaatacggttgactatggaggtatggaagaatcatctatattatttacgatgattttaatgtttattggtgcaggaagtgtatcgacaggtggaggaattaaattaacgacgtttgttatcttaattacatctgtcctttctttctttagaaaaaaggaggaaattgttttatttcagcgtacaattaaaatgtcgacagtaacgagggcattagcaattgctgttgccagtcaaatacttattttagcagcggtattcatattaatgcttacagaaaacttcagctttattcaattattatttgagacaatatcagcgtttggcacagtcggattaacgatgggaattactgcacagctatcggcattcggaaaatgtattattatgtttgttatgttctgcggattaattggaccattaacacttgtgttctctttagcgcgaccagcaaaacaaaaaataaaatatccatcggaagatgtgtttacaggataaggtatcccgcgttaagcgagatacctttttcttttttagaacagggagaacaatagaccaataagtgctactcggaataaaattgcgataagtgcagcaattccaccgacaactgcagcgataccgccagttacagtagctccgcgattataagcgtaaataccgagtaaaacagaaacaagaccaaatagtgttggaaatgtaaatagcgataagatagatagcgcaagagcgataaaaccagcagttgatccagcagcggacgattttacaacatctttatcgtctttatcatcgtaatcataatcaatgcgttgtggtgcgacctcagcggcgtactcttctttatagtcactataatcactatctattctatctctttttttataatcatcaaatttctcagtcaaagtcatgactcctttcataacaaggttcaatagtagtatgtatctctttttcttttttatcccgctatttgtgggagtcgagctacgtacacatcccactgattaaagtttcactataccggagcatgtacagggagtagtatcttttaaaagaaggaaaatgtttttttaaaataggaaaagttagtatgacttcctctattttggaaaatataaaaaggaataatgaggaaagggtgcaatacataatggaacatccaattgaaaatttaatgaaaacggcaatgacaaatttaaaagagatggtagatgtaaatacaattgttgggagcccggtttcaacagctgacggaaatgtagtattaacagtatctcaagtggcttttggttttggagctggtggaagtgattttaaaggggatttcatcactgaaaaacataacggtgggcaaaatcagcataaagagaacaaacaagggcatccatttggaggaggaagcggggctggggtttccattagtccagtagcttttttagtagttggttctaatggggtgcaagtattacatctcaacagcagtacacatttaattgaaaaggccttaaatactgtaccaagcactgtagataaatttgtgaatggtcgtcaaaagtgaacttgcattttttaggaattatgatatattagaaaaagtgcgctttaggatgatcggaataattgaaatgtaaatatatatgatgtgtggaataagggagaggaatttatgattaatatcaaaaacttagtagttggcttatttatgttagtaagcggctttgttgtatatgtaataaaagaaaaagctccattttaaaacagacaaaccgttaatgtctgtttttaatttgcggaaaaaagttgacaagttattgtattggtgttaagattttaattcgtgtctcggttacagctagtgtaaagtaaatatctcttatgaatgcaatacgaaaagtttgcgaaagatcgggtaattttatcaacaacttttgtgaacaaaccctataaattgtatttgtaagctatatatgtatactagtgaatcaaggagcggtcagtggaaccgtaatgatgagagagaggtagggctttcatccagtatatgttactttcccgttaggtgaatataaaaaagaggactccttttaaaaggggtcctcttgcattttttaagtgcgactttcaacttgttgacaaatttcatccgttgttaaaccgtgagctgtaatgactgatcctttaattgatgtatctgcaatgcccatcacattagaatcttgcccagttacaacgcaacaatcacacccttgtgcatcctgttctgagttaagtgtaacaacttcatgaccttgttgttgaagagcttgttgaacgtctgttaatgagttttcaacgccaattctagccataattatcacctcctaccatctaattgctagtatgctcaagttcactgcatatatttatgaaaagacggtaggaagtaaatctttgtttagtcgttatatacgccagtaagcatttgactaacgaattgatcgtttaatgtatcttgtgctgaagaagtatttgaatggatgtcgattgaagcaataaaatgattatgttctttcgtatttggttctacctctacgtaattatcgaatttacaaaaacctttcgtatccattagatcaaataattgcagcatttctactacctcttgtctcgttcctttaatttgtacacacgccatatttatttcctcctttattttgacaaattgttttttaaaaataggattatgattacgaaatgaaaaatatgaatgttatttttagacagcgctatttttgttattttccccctttttcagcaaaagtcgttatatatccccggatttataaaatcggacgtccgtttattgaatacaatagattcgtatcaattgatgaaaatccttcttttaaacaaatatttttttagtggaagttggcgaaaaaaattttttgactttttgtaaacgttaacaatgttgttaaatcagtataagcaaagaagtacgtatgattaaaaattataaattttctaaaaaattcacttgatttatttagaaaggagagtaaactaggaaacaataaaaaattcatagaacataggaggcgcttctagtgaatgagcaatggattttcttaaatggagaatttgttccaaaagatgaggcaaaagtttcagtatatgatcatggctatttatatggcgatggagtgtttgaaggaattagagtttatagcggtaatgttttccgtttgagagagcatcttgtccggctgtatgaatcagcaaaatcaatccttttagaaattccatattcattagatgaagtaacaaatattgttgttgagacgattcgacaaaataaattatctaatggatacattcgccttgttgtatcaagaggagcaggaaatcttggattggatcccgattcatgtaagaagccgaatgtagtagtaattgcagaacaattatctttattcccacaagaatattatgagaaagggattccagttgtaacagttgcaacgcgccgaaatcgtcccgatgttttatcccctcaagtaaaatctttaaattacttaaacaatattttagttcgtattgaagcgaaattagctggagtacaagaagcacttatgttaaatgatcaaggatatgtagctgaaggatcaggagataacgtgtttattgttaaaggaaataaattaattacaccaccaagttctgctggagcgttagaaggtattacacgaaacgccattttagaaatcggcgaaaaacttgggtatgacgtaagagaagagttatttacaagacatgatgtatatgtagctgatgaagtgtttttaacaggaacagctgctgaagtgattgctgttacgacagtagatggtagaacgattggcttagggcaaacaggtccacatacgaaccgtttattaaaagagtttcgtaagttagttgtagaagatggagagaaaatttacgaagaaaataaagttggataacaacttttttaacataagaaagcgttgatagggaggagtagttgattgtgaagcctcacagagagtcggtggttgctgaaaaccgatggttcacgtcgacgaacatcgcccttgagtgctaagctaaagcatttgtctaggcttagacggtagctccgttattagctagatccatttatggatcactgaggcaagagtattcttgcgaagaagggtggtaccgcgaaatctttcgtcccttcagcacatagctggagtgtggacgtaggatttttttattgtataaaagtttgaaaaagggggcttataagaacaatgtcttcaaaaacggaagagaaactggcaactggtgcacagctattgttagaagcgctagaaaaggaaggcgtagaagtgattttcggttatccgggtggtgccgttttacctctctatgatgcattgtatgattgtgaaattccgcatattttaacaaggcatgagcaaggggcaattcacgctgctgaagggtatgccagaattacagggcatccaggggttgtaattgcaacgagtgggccaggtgctacaaatgtaattacgggtctagctgatgcgatgattgattcattgccacttgtagtatttacaggccaagtagcaacaacgttaattgggagcgatgcttttcaagaggcagatattatgggacttacgatgccagtgacaaaacataactatcaagtgcgaaaggcctcagatttacctcgaattattaaagaagcatttcatattgctaaaactggaagaccaggaccagtcgttattgaccttccgaaagatatggtagtcgagaaaggtgagcaatgtagcaatgtacaaatggatttaccgggatataaccctaattatgaaccgaatctacttcaaataaacaaattactcaaagtaattgaaaccgcaaaaaaaccgttaattttagctggagcgggtatattgcatgcgaaagcttcgaaagaattgacaaattttgctcgtaaatatgaaatccctgttgtgcatacattacttggtcttggtggttttccaccagatgatgaactatttctagggatgggaggaatgcatggttcttatacagcaaatatagcgttatatgaatgtgacttactcattaatataggcgcgagatttgatgatcggcttacagggaatttagcttattttgctaaaggggctactgttgcgcatatcgatatcgatccagcagaaatcgggaaaaatgtgccaactgaaattcctattgttgcaagtgctaagcgggcattggaagtattacttgaaccagaagggggaaaagaaaatcatcatgaatggatcactttattaaaggggagaaaagaacaatatccattctcttataaaagaaattctgaaagtattaagccccaatacgcaattgatatgttatatgaaattacgaagggagaagcgattgtaacaacagacgttgggcaacaccaaatgtgggcagcccaatattatccgctgaaaaatccagataaatgggtaacttctggtggattaggaacgatggggtttggatttccagcagcaatcggtgcgcaaattgcaaagcctgaagaattagttattgcaattgttggtgatgctgggtttcaaatgactctacaagaattaagtgtattaaaagaacacgctttacccgttaaagtatttattttaaataatgaagctttaggaatggtaagacagtggcaagatgaattttacaatcaaagatattcacattctttattaccatgccaaccagatttcgtcgctcttgcgaatgcatatggcataaaaggtgttcgtattgacgatccacttcttgcaaagaagcaaatccagcatgctattgaattacaagagccagtcgtaattgattgtcgtgtacttcaatcagagaaggttatgccgatggttgcgccaggaaaaggtgttcaccaaatggagggagtggaaaaagggtgaagagaattgttacagcgacagttcgaaatcaaagtggtgttttaaaccgaattacaggggttatgacacgaagacattttaatattgaaagtatttcagtaggtcatacagaatcatcagatatatcgcgaatgacgattgttgtacacgttgaaagtgaacagcaagtggagcagttaattaaacaactgcataaacaaattgacgtactgaaagtatcagatattacagaagaagcgatgattgctagagagcttgctcttattaaagtagcaacttctgtagcgagggcagaattatatagtttaattgaaccgtttcgagccgctgtaatagatgttgggaaggattccatagttgtgcaagtaacaggtacgcaagacaaagtagaagcgttaattgaattacttcgtccatacggtttgaaagaaattgctagaacaggtgtaacagcatttacacgtagtatgaaaaaacaagataagcaagttatgttaattcaataatcatttaaatatagggggaaatgaaaatggcaaaagtttattatgagaaagatgtaacagtaaatgtattaaaggaaaagaaagtagcaatcatcggatatggctcgcaaggtcatgcacatgcgcaaaatttacgtgataacggatttgatgtagtagtaggtttaagaaaaggtaagtcttggaataaagcgaatgaagatggattttctgtatatacagtagcagaagcagcggaaaaagctgatgtagtaatgattctactgcctgatgaattacaaccagaagtatatgaagctgaaattgcaccaaatttacaggctggaaactccctcgtgttcgcacatggatttaatgttcactttgatcaagtaaaaccaccagctaatgtagatgtatttctagtagcgccaaaaggaccggggcatctcgtacgccgtacgttcgccgagggcggggctgttcctgcattatttgcagtatatcaagatgcaacaggagttgcgactgaaaaagcactttcttatgctgacggaattggagcaacgagagctggtgtactagaaacgacgtttaaagaagaaacagaaacagatttatttggagagcaagctgtactctgcggcggagtgactgcacttgtaaaagcagggtttgaaacgttagttgatgcaggatatcagcctgaacttgcatattttgaatgtttacatgaactgaagctaatcgttgaccttatgtacgaaggtggacttgaaaatatgagatattcagtttcagatacagcgcagtggggagacttcgtatcaggaccacgcgttgttactgaagatacgaagaaagcgatgggggcagtattagcagaaattcaagatggtacatttgcaagaggctggattgcagagcataaagcaggaagaccaaatttccatgcgacaaatgagaaagagaataaacatgaaatcgaagtagttggacgtaaattacgtgaaatgatgcctttcgtacagccgcgagtaaaggtaggggttaaataatatgaagcaggttttgttcatggatacaacgcttcgtgatggcgaacaatcaccaggagtaaatttaaatgaacaagagaaattacaaattgctaggcaattagagaggcttggtattcatgtaatggaagctggattcgcggcagcttccgaaggtgactttcaatcggtaaaacgtattgcgaatacaattcaaaatgctacggttatgagtttagctagagcgaaagaaagtgacattcgaagagcatatgaagctgtgaaaggtgctgtatctcctcgtctacacgtatttttagctacgagtgatattcatatgaaatataaactttgtatgtcaaaagaagatgtgttaaatagtattcatcgctcggttacgcttggaaaatcattatttccgacagtacaattttctgcagaagatgcgacaagaacatcgagagcatttttagctgaagcagtagaaattgcaattcgagcaggagcgaatgtaattaatattccggatacagttggatatacgaatccagaagagtattattctctttttaaatacttacaagaatccgttccatcatatgaaaaagcgattttttcttgtcattgtcacgatgatcttggtatggcagtagcaaattcgttagctgcggttgaaggaggagcattgcaagtagaaggaacgattaatggcattggagaaagagcagggaatgcagcgttagaagaagttgcggtagctcttcatattagaaaagatttttataaagcagagccttcaatgactttaaaagaaattaaggcgacgagtatattagtaagcaggttaacgggtatggttgtaccgaaaaataaagcaatcgttggagcgaatgcatttgctcatgaatcgggcattcaccaagacggggttttaaaagaagtaacaacttatgaaattatcgaaccagcgcttataggagaatctcaaaatctctttgtacttgggaaacattctggccgtcatgcgtttacggaaaaaatgaaagagcttggttatgaatttacaaatgaagagcgagatgcggcattcgaagcatttaaaaagttggctgatcgtaaaaaggaaattactgaagaagatttacgcgcacttatgcttggtgaagcagcatttgcagctcagcaatataacattacgcaattacaagtgcatttcgtatcaaatagtacacaatgcgcaacagttgtgctgaaggatgaggaaggaaatgtatatgaagatgcagccactggttctggtagtattgaagcgatatacaatgcgattcaaagaattttaggattagaatgtgaattggcagattatcgcatacaatctattacacaaggtcaagatgcacttgctcacgttcatgttgaattaaaagaaggtagtcaccaaatatcaggtttcggagttgcgcaagacgtattggaagcgtcggcgagagcttatgtccatgcagcagggaaattaaaatctcttatagcgcttgggaaataaatatttgataggtgagagaagctttcctcacctatcaaattaaagttctgaaaattcagttaaaaggagtgttaaaaatggaaaaacgtatcgtttgtttagctggtgatggtgttggtccagaagtaatggaaagtgcgaaggaagtattgcatatggtagaaaggctatatggacatcattttcatttgcaagatgagtactttggtggtgttgctatcgatttaactgggcaaccattaccacagcgaacacttgccgcctgtttagcgagtgatgcggttttacttggagcagtaggtggaccaaggtgggatagtgcgaaagaaaggcctgagaaaggattattagcattaagaaaaggactcggtgtatttgcgaatgttcgccctgtaacggtagaaagtgcaactgcacatttatcaccattaaaaaacgctgatgaaattgatttcgttgtcgttcgtgaattaacaggtggaatttatttttcttatccgaaagagcgaacggaagaagtggcgacagatacacttacgtatcatcgccatgaaattgaacgtatcgtttcgtatgcttttcaattagcgaataagcggaagaaaaaagtaacatctattgataaagcgaatgttttagagtctagtaaattatggagaactgtgacagaagaagtagcacttcgctacccaaatgtggaagtagaacacattttagtagatgcagcagctatggaattaattcggaatccaggaagatttgacgttattgtaacggaaaatttatttggtgatattttaagtgatgaggcttcagtattagctggatcattaggaatgcttccatcagcaagtcacgctgaaaaggggccttcattatacgagcctattcacggatcagcaccggatattgcggggaaaaataaggcgaatccaattgcgatgatgcgttctgttgcaatgatgcttgggcaatcgttcggattaacgagagaaggatatgcaattgaagaagcagtttctgcagtccttaaatcaggaaaatgtacagcagatatcggggggactgaaacgacaacttcatttacaaaggcagttattcaagaaatggaagagcaagcgttagtagggagaggaagataatggggaaaaggttactagataagctttgggaaagacatgtagttgcgactaatgaaaatggattggatttattatatatcgatctacatcttgttcatgaagtaacgtcaccgcaagcctttgaaggcttgcggcttacaaatcgaacagtccgcagaccagatttaacatttgcaacgatggatcataatattccaacgaaagatgtttggaatattaccgaccgcattgcgaagcagcaactagatacacttcgggaaaactgtaaacaatttcaggtgccattagcggatatcggagatgaagagcaagggatcgttcatgtaataggaccagaacttggactcacacagccaggaaaaacgattgtttgtggtgatagtcatacagcaacacacggtgcttttggcgcactagcgtttggtattggtacgagtgaagtggaacatgtattggcgacgcaaacgttatggcaacgaaagccgaaagcaatgggcattgagttaaaaggaaagttaccgcaaggtgtttatgcgaaagatattattttacaccttctttcaaagtacggagtagcagttggaacaggttacgtaatggaattttacggagaggccattcatgctatggatatggaagagaggatgacgctttgcaatatggcaattgaagggggagcaaaggctggcattattgcaccagatgaaaaaacggttgcttacgtaaaagggcgtaaatatgcaccgaaagactatgaatctattaagaaaaaatggtcagaactttatacagatttagatgcagtttatgatttacatattctagtagatgttacggatttagcgccgtacgttacgtggggaacaaatcctagtatgggcgttcggatcgatgagaaattgccagaaaagcatgatgcaaatgacgaaagagcgttttcttatatgggattgagtcccggacaaagtacgtatgacattccagttcaacatgttttcattggatcttgtacaaattccaggctttctgacttagaaattgctgcatctgtcgtgaaaggtaaaaaagtaaaagaaggtgtgcgagcacttgttgtacctggatctcaaagggtaagagaagcagcgatgcataaaggattacatcgcatatttgaagaagctggatttgaatggagagagcccggatgctcaatgtgtctaggtatgaatccagatcaagtgcctgaaggggaacattgtgcctctacgtcaaatcgcaattttgaaggaagacaaggaaagggagcacgaacgcatttagttagcccggcaatggcggcagcggctgcgttatatggtcattttgttgatattagaaaggagagttatgatggagccatttcgtattcataaaggtactgccgcagtactgatgaatgataacattgatacagatcaaattattccgaagcaatatttaaagagaattgaaagaactgggtttgggaagtttttatttgatgagtggcgatatgataataatcgccaagaaaaccctaatttcccgcttaatgcacaagaaagaaaaggagccagtatattaatcacaggtgataattttggatgtggctcgtcaagagaacatgctccatgggcgcttgctgattatggtttccgcgttattatcgctggaggatttgccgatatcttttatatgaattgtatgaagaatggcatgttaccgattgtaatggataaagatatgcgtgaacaacttgctaaaacagatgcgagggaacaaattacagttgatttagaaaatgaaataatgacaacgaatacgcatagattccattttacaatcgagaaaatgtggaaagagaagttattaaatggtttagatgaaattagtattacaatgcaatatgaacaagaaataaaagagtatgaaagaaaagtggctttacattaaaaaagtgacggaatattaaaaatgtatttacattcaaaattaactgttatatactatgtgaaaatcagaggagaaagggagtaagtattatgaatatcgtgcaatctattacaatgcttacacaactacatcatcatacatgaaacccttgaacctagcgtgaaaacgtgtaggtacaagggttattcccgttgtacctacactctactgaagagccttgtaggtattttgtctacaaggctctttttattttcggcttaggggaatgaaataggcatacattagaaggggaaaggtgtgaaaatttagatgacaaaatggaaacgagcaaacccgaatggaacgagagattatttattcgaagaatgtacgttaattgaagaagtagaacagaaattaaggcttacttttttagagagaggttatgaggaaataagaacacctacaattgaattttatgatgtttttgcatttcaaaatagaccgatagatgaagagaagatgtataaattttttgatgaaaagggaaggattatcgttttacgtccagatatgacaattcctttagcgagagttattggaacacagagatgggatacgccacttaaagtgacgtatagcgggaatgtatttcgagcgaatgaatcccattctggaaaatataatgaaatcgtacaaagtggtattgaagttatcgggattgataatgtaagagctgaaattgaatgtgtaataagtgtcattcaagcacttcaaaagttgaaggtgcaatcttttacaattgagattgggcaagtacagttatataaatgtattgtaaaaaaactctccatccatgatgaagaagaaagggtacttagaacgtatatagaaagtaaaaattatgcagccctctcaaattttatcggagaaaagaaattaaatcgatgcgatgagacagtaaggttacttgagaaattgccaaggctatttggaaatttagaagttattgaggaagcagaaaagcttgcttcaagtaatgaaatgaaaatggcaattgcaagaataaaagaaatgtatgaaacaattgaaacgttaggatatggttcttacatatcaattgatttgggtatgattcaacacttagattactatacgggtgttattttcaaaggatatatatatgaaattggagaagaaatcgttagtggcggaagatacgatgagctaattggcaattttggagaaatgctgccagctgttggactcgcggtacaagtaaatcaaattgtgaaggcgctgcaagagcagcaagaaccatatgaacgaaatcaaattgatattgtgattcattatgagttaaatagattagcggaagcagaaaggttacgaaatttacttcgaaaggatgggaagaatgcttggttatctctattctctaatttaagcgatacctttcaatttgcaagaaaaaataaaataggaacggttgttgaggcaaagaatgaatatttagtggaatatgtatggaatgagaaatgggtagtccagaaagaaggagaggcttcatgcgtaacattcaaattgcgttaacgaaaggaagattagaaaaacatgtcattccactttttgagcagattggaattgattgttccgagctcaaaaataaaggtcggaagcttgtatttcaaagtaaaaatacaaatatttcatttattttagtaaaagcggttgatgttgctacttatgtagaacatggggtagctgatattggcatcgttggaaaagatattttaatggaaaacgagaaagatatttatgaaatgctggatttaggagtggggatttgtaagttttgtgttgcttctattcctacgtataatccgaagagttaccggaagaaaagaatcgctacgaaatacccacatattacttctacttattttcatgataagggagaggatgtagaaattattaaaatagaaggttctgtagaaatcgctcctcttcttggattggcagatgcgattgtagatattgttgaaacaggaaaaacattacaagagaatggactcattgtatttgaggaaatgtactttatatcggctcggatgattgtaaataaggcagccttaaaaactaaaaaagacgaaatattcagcattataaatatgatggagcaagaaatcttatcagggaaataggaggatttaaaatggaaatcatttatgaagactttaaggaggcattatctaaaataaaagtgctaagagaaaacgctaatataatagaagaaactgttcaaagaagtgtaagagaaatcattagacatgtaagggaaggaaatgatgaggctttatctttctatacaaaaaagtttgatggtgtagagatgaaagattttcgtgtaagtgaagaagaaatacagcaagcgagtatgtttgtagagaattcatttttagaagctttaaaagaggcgaagaaaaacattgtttcgtatcacgaaaaacaaaagaagtattcaatcttcgattgtgaaagtaaaggcataattagagggcagcttattcggccattagaaaatgtaggtgtatatgtaccaggtgggacagcttcatatccttcttcagtattaatgaatgtattgccggcgaaacttgcaggtgtgaaaaaaattgtaatggtaacaccgccgaggaaagggggaattgatcctcatatagtagctgctgcaaatcttgcgggagtagatgaaatttatacgataggtggcgcacaagcaattgctgctttagcatacgggacggaatcgattccgaaagtggataaaatagttggaccgggaaatttgtacgtcgctctagcgaaacgagaagtatacgggatagtaaatatcgatatgattgctggtccatcagaaattgtagttgtcgcggatgaaacaggtaatgcaaaatatatcgcagcggatttattatcgcaagcagagcatgatgagagagcaacggcgatttgtattacaacgaatatggaactagctaaagaagtagaaaaagaggtagaaagacagttagaaacgttaccaagaagtgaaattgcacgtgaatcaataaatagaaatggagccatctttatcgttgcttctttagaggaggcactaaagttatcaaatgaaattgctccagaacatttagagttacatataaaagaaccgatgaatgctctagattatgtgaaacatgcaggctctattttccttgggccatatgcacctgaaccgctcggggattatttggcgggaccgaatcatgtattaccaacgagcggaacggcaagatttttttctccgttatcagtcgatgatttcgtgaaaaaatcaagttttatttcttatacagaggaagcattaaaaaatgtacagcatcatattgtagagcttgcaaataaagaagggttacatgcacatgcgagagcaatccaaataaggtttgaggaggaaaaataatgcgtcagtccagtcaagcacgtgagacgacagaaacaaaaattaaattaagtttgcagcttgatgaaagtacgagtgtatctattcaaacgggggttggttttttcgatcatatgctgactttatttgctagacatggaagatttggattgcaagttgaggcagaaggtgatgtatttgtcgatgcacatcacaccgttgaagatgttggaattgtactcggaaattgcttgaaagaagcattgcaaaataaagaaggaattaatcgttacggttccgcgtatgtaccgatggatgaatctttaggatttgttgcaattgatataagtggacgctcatattgtgtatttcaaggggaattaacaaatccgaagctcggggattttgatacagaattgacggaagaattttttagagcagttgcacatgctgccaatattacattacatgcgcgcgttctatacggaagtaatacacatcacaaaattgaagcattatttaaagcttttggtagagcgcttagagaagcggtcgaaaaaaatgccaacattactggtgtaaattcaacgaaagggatgttgtaattgattgccattatagattatggaatggggaatattcgcagtgtagagcaagcattaaaatatattgaggcagagtacattgtaacgagtgataaagaagagatattgagaagcgatggcgtgattctaccgggagtaggtgcatttccgaaagcgatggaagtattaaaagaaagagatttagtgtgtgtactaaaagaagtttgtgacataggaaaaccactcctcggtatatgtttgggcatgcaacttttatttgaacgaagtgaggaactaaaagattgtagcgggttaggtttactaccaggtgaaattcggaagttaaaagtttcgtataaaattcctcatatgggatggaatgaattaaggaaggaaagagaatttccgctttggaatggattagtggatggttctttcgtgtattatgttcactcatattacgcggattgtccagatgaaattgtatgcggagtaagtgattatggaatgcaaataccagggtttgtcgcgaaaggaaatgtatttggtgcacagtttcatccagaaaaaagtggcgaaattggcatgcaaatattaaaaaattttcaaggagtggtagaagcatggaaatcttcccagctatcgatttaaaagaagggcgatgcgttagactttatcaaggagagtttagtaaagaaacggtgatgaatgaagatccggtagcgcaggcgatcatatttgaaaagcttggagcggaaatactacacattgttgatttagacggtgcaattgctggcgagtcgttaaatttgcccgtcattgaaaaaatctgcaaggcggtacgtattcctgtgcaagtgggaggaggaattcgttcacttgtaacggtggagaagttattgtcagcaggtgtagaaaaagtgattttaggaacagcagctctttatgataagtcatttttagaggaagcagttcgtctatataaagagaaaatcattgttggaattgatgcgaaaaatggtttcgtagcaacgagaggttggcttgatctgtctgaaatttcttacgttagtttagcgaaacaaatggaaagtttaggtgttcaaacgattgtgtttacagacatttcgaaagacgggacgcttgcaggtccaaattttgaacaattagcgatacttcaaaaaagtgtgggcattcgtctcatcgcctctggaggagtggcatctattcaagatgtgaaaaagttaaatgatatgaatatatatggtgtcataattggaaaggcgctttacgagaaaacgattgatttagaagaagtgttacaggtaacgaagttatgttagcgaaacgaatcattccatgtctagatgtgaaagaagggcgagtcgtaaagggtgtaaattttataggattacaagatgtcggtaatccggttgaaatagctgaagcatataacgaggcaggggcagatgaaatcgtatttttagatattacagcgactcatgaaggaagaaaaacgattatagatgttgtagaaaaaacagcagctaaagtatttattcctcttacggttggcggggggatttcaagtgtgaaagatatgtacaatttactaagagctggagcagacaaagtttcaataaactcagcggcagtgcgaaacccgaagcttatagaagaaggggcagaacactttggatcacaatgtattgtcgtggcaattgatgctagaaaagtagcagaaggtaaatggaacgtatacgtcaacggcggaagagttgacacaggaatggatgccatagaatgggcgaagcgtgttgttaaacttggggcaggtgaaattttgttaacgagtatggatgcagatggaacgaaaagcggatatgaccttcgtttaacagaagaaatttcaaaaagtgtttccattccagtcatcgcatcagggggctgtggtcatacggatcacattatagaagtttttcaaaagacaacagttgatgcagcgttagcggcatccatctttcattatggtgaggcgacagtgcagagtgtaaagcgaaaattaagagatgcaaatgttgaggtgcggttatgaaacctaatttttcaaaaggattaataccagcaattgtcatcgaagaaggtacgaaagaagttttaatgctagcttatatgaatgaagaagcatatgaaaaaacgttagagacgaaaagaacatggttttattctcgttcgaggcagtcgttatggaataagggggaaacatcagggaatcttcaatatgtgcaatctttatatttagattgtgatcaagattcaattgttgtgaatgtgaaacaagtaggacctgcttgtcatacgggagagaagacatgttttcactatcaaattatatagggggatacatatggaaaatgcctttaagttgctgtataaaacaattgaagaacgaaaggaaagcccacttcctgaatcgtatacaaattatttattttcaaaaggagaagataaaattttaaagaaaattggtgaagagtgtgctgaagtaattatcgcatgtaaaaataatgataaagaagaagtagtgaaagaaatggttgatgtattttatcactgtttcgttttattagctgaaaaaaatattacattggaagatgtcatgcgagaggtgaaagaacgaaatggaaagctttcgagagttggggatagaagggaaatagatacattataagggggaatgtatatgaaagtagattatcatcttcacttagaagaaggaccgtattcaataggatggcttgctaaaataaatgaagcgctggaacgttatgaaccgcttcaagaaaggcattctattgattggcttatgaaaacacaagagcgtttgcaaaagcgtgtgaaggaagggccatttacaacagaatggatggacctctatttagaagaagctgtgcgaaaaggtataacagaagttgggattgttgatcatttatatcgttttcatgaagcgaaaggatattatgaaaaatatgtagatattagtgattctaagctcggtcgtatacagaaggaatggttagatcaagtaagggtagtttcactgtatgattttacaaaggtcattgaagaggcgaaagaacgatggagtaaaagaggtgtcacacttaaacttggaattgaagcggattattttattggttgtgaaggagagttaaaagaattattagcgctaggagactttgattatataattggttccgttcattttctaaatggctggggatttgataatccagatacgaaagaatattttgagaagcatgacctacgcgcattatatgatatgttttttaaaacagttgagagtgcgattcgtaccgagttatttgatattatcgctcatcttgataatataaaggtatttaattatcgattggatgagaatgaacagctttcttattatgaggaaattgcctgtgcgttagtagaaacgaatacggcaacagaaataaatgcaggattatactatcgttatcctgttcgtgaaatgtgcccaagtccactatatttacaagtattagctaagtatggtgttccaattacgatttcttcggatgcccattatccaaatgatttagggaattatgtacaagaaaatgtacaaacattactagctcacggtgttactcaggttgcaacatttacgaagcgagcaagagtaatgaggtcgcttgaagaagaagtaacaaattcaaaatgaaacgcaattttttgatgaaaaccgtcctttttgttcaaaataagaaagaatgaaaaggagggtaagaaatggcgaaacaacaaaataaacaaaatgtacaaggtgcacagcaacaagcttatacttctgaaacgaatgctgaatctcaatcggttattgaggagcaaattagcgatacggttgcagaaggaacgattgatgtgaagcttggaaaagaatcgcaggaaaaagcgtaagaaaaggggagagttgcatctcctcttttttcatggaaaagtgtcgatttttaaaactataatcaaattccttggtttttatatgtggatttcttacaatgaaatataagagatatcttattttctatagaagaggtgttagtagtggcaaaaatattagtagcgggaaaaattccggaaattggattagaactattaaaagatcatgatgtagaaatgtacgataaagaggagttaatttctatagatgaattaacagagcgtgtaaaagataaagatgcattgttaagtttactttcgacaaaggtgccaaaagaagttattgatgcagcgcctcatttaaagattgttgcaaactatggtgctggttacgacaatattgattacaagtatgcgggcgaaaaaggaattgcagttacgaatacaccgaaagtatcaacggaagcgactgcagaattaacatttgcacttcttttagcagcggcgcgtagaattcctgaaggggatacgttatgtcgtacgactggatttaacggatgggcaccgttatttttcttaggacgagaagttcatggtaagacaatcggaattataggtcttggagaaatcgggaaggctgttgcaaaacgtgcgaaagcatttggaatggatgttttatatacagggccaaatcgtaagcttgaagctgaaagtgagctgggggcaacgtatgtgatgttggaagaattattacaaacagcagactttattacaattaactgtgcttatagtccaaatttacatcatatgattgatgaagagcagtttaaaatgatgaagaaaacagcgtatattgtaaatgcttcacgtggaccaattatgaatgaagcagcacttgctcatgcattaaaaacgaatgaaattgaaggagcagctcttgacgtgtttgaatttgaaccgaaaattacagaagagctaaaagaattaaagaatgtagtacttgctccacacgtagggaatgcaacatttgaaactcgtgatgcgatggctgaaatggctgtcagaaatattttagctgtattaaacggcgaagagccagtaacacctgtaaatcaaaaggtattagttacaaaataaaaagaaaccttccggactcggaaggttttcttatttttctttattcgcttttttagacggtctttgtctaatgaattgagataacatgtacaaaatatatagtggaatggcaataaataagaaaacagaaaaatttccaaatcctgtttgatacattgtaataatgattccaactaaaaatagtgtaataatgatgctatatcgtggaattggtacatcttttaaacttgggatacgaatgcggctcaccattaaaaatgcgaacgttacaaatacggtaataagaacgatttttggaatggtatgtgaaaataatgttaagaaagcaacaagccctcccgctgctgtaatcggtactccagtgaaatatttcattgaagtagaagatggtgttacattaaatcgtgctaaacgatatgctccgaaaagagggaataatcccgctatgtataatccgatgattccgtagtttgagaaagatgtgtaatacattaaaacagctggtgctgcaccaaatgttacgacatctgcaagcgagtcgagctcttttcccatttgtgaatcaacacgtaataaacgagcaacacgaccatcaagactatctaacatcatcccgataagtactaaaatagcagctgatttataatatcctaaagatgcatagccgattgataaaaatccgctatataaatttccgagcgtaaataagtttggaatagctgctctatacaaaatctgatcccttgctttctgtaataaattcttaattagtgtatgaaagtttacttattttatcataccataaatttattcctcatacgaaagaaattaccaatttgtgaaagatttcatagaaggatggtttgaaaattaagtgaaaataaaaagaggaagcaacttgtataaagttgcttcctttactattcaaatttcgttgtcatcgttccagttttatatcgattattaggatcgaagcgtaataaatctccataaattaatttatcggagagttttaattctgtttttgctttttcaatatacggctgacatagcgtcatgtcagcttcttcacccgtacttcttttgtagcacatattttttgtataaacatactcttcagaaacaaagctaccatcacgcattaccataagcgggtctttctctttaataaataagtcagttccaaattcaacggatttatttgttttaataccaagtaaatgaaggagcgttggcttaatatcaatttgaccggatactttagaaacaacttttccttcttggccaggcacatgaataataagagggactcgttgtaattgcatagaatcgaatggtgtaatagtatcttttcctaggaactgtgccatagctgcgttatggttttcggaaataccgtaatgatcaccatagatgacaataacggtattatcatacaatccttcttcttttaattgtttaataaataatttaagagcttcatctgtgtaacgaacagttgggaagtagcggtttacaacaccactttccgagttgaattcatcaacatattgatcttccggatttagaagaaatggaaaatgatttgttaatgtaataaattttgtatagaacggttgcggtaaagattttaactttggaatagattgttcaaagaactctttatcttttaatccccaaccgacagacatttgctccgttcctgcgtaatcatttaaattaaagtaacgatcatatccaagcgcaggatacattacatcccgattccaaaacgttttatcatttgaatggaagacggcagaagaatatccgtatttctttaattgttctggtgtcgctgtgtattcatttgttgcatgagtaaagaatacagaaccacgatctagcggataaagtgagttttcaacgataaattcagcatcagaagttttaccttgtccagtttgatgatagaagttatcgaaatagaaactatccttaataaattcatttaaaaatggtgtaatttcttttccatttatttttttattaataacaaagctttgtgtagattccattgaaattaaaattacatttttaccttttgcagctccaaataagtttttatcaacttgtttgtcttttgagtctgtatagtttttaatttcagaaaacccatccccacttgcaaatacacgctcagctgaggacttggattgaagcgtaatatcaaatagatgatatgtgtataaacctaaattcttcacgacagtttgacggtcaaatgagcgtgagaacatttgtggtttataaataactgatacaacaatttgtagtgctaataaagctgttacaccgctaaagaaagttcgcttctctgagcgggaaagtggtgttttgtcgccaaatgatgggaatttacgcgaaataaacattaaaataattgcatctgcaaataaaagtaatgttttgtacgtaaagagttcttttatacttgtccctaaatcagccatattgtttgtttggaataaaactgggaaagtaacgaaatcgttatagaacccataaaacattgcgtttccaaataaaataaatgacagtataaaactgattccaattataattcggtttcggtgcttagatgcaagtaaagctaagccgaaaaataaaagtaacgcagctagtggattgataaaaagcatgaattcttcaaagaaattatcaattttaatatcaaatgctagcttgtacacaatatatgttttaatccatagtaaaacgactgcaacgagtgcaaatcgcagttttggaaacagatgttgtagcataatatactcctctcctaaaaagcatgacagttcttgagagtcagtttgcttaacgactcattttatatatacgaacagtcctttgttattatgattattatactatgagtatcattatacgaaaataaaagaaggttgtgggcttttttataataatcgagtagaaaaagagtggtgggagacaataaaacagaatttctatgtatgataattattgtacgcagaaagaatcgcgtgataatacggaggttataatgcgaaaattattatattttatagcatgcagtagtgttatactttttacttcaccgagtgtgtcggtagcccaatatgatgcacctcttatggaagatgcactttattctgttttatttccaaaaataaataaagcaattgaaaaacaatatggaagtttgaaaccttatcaatgtcctaaaattattagtttaaaaaaagtgtatagcggtacatatttatttcaagcaagtattgaagtgacaaagtatgaacgtgttgctgggaaaattgctccaccatttgagaaggtaacgattacatttaataacgaagaaggcgaatgggaagtaacaaaggtattagtaaagcgcttaccagacgatacgaaattaaactgcaaaaaaacaatataaaaaattgtttgacaaataaaatggtcctttggtattgttaatagcaacaattagatgtttgaaaattaaatagacttacctcatctactctcaaaggtagaggccgcgataggaaagagtaagctatgggagatttaatggaatctgtgatcataggttgaaagggactattgccgaaatataagaataaccatcttattcatatattgggactgcattgaataaatgtagtactgtcataagatttattttatggagagctatttggagatgttgatgcggtttcttattttgaggagataacaactcgtttattttttcaatatatatttttcctaataagaaacgcgtgtgaacattgttccgcgcgttttttgtctatctaaaagcgtgctgcaatgaatagaagattggggttatgagttttagaggaaataagggaggaatttaaatgtatttacacggcacaagccgaattaatgggcaaggacacttagaaattggagggtgcgatacgacgcagctagcaaagcaatacggaacaccactttatgtatacgatgaagagtctattcgaggaaaatgccgagcatttcatcgtgcttttaaagaaagtggtttctcttatcaagtagcatatgcaagcaaggcgttcttgtgcatggagatgtgccgagtagctcgtgaagagaatatgtcattagacgttgtctctgggggagaattatatactgcgctccaagcaggatttccggcatcacgtattcattttcatggaaataataaaacagaagaagaaatagtgatggctcttcaggcgaatatcggttgttttgtcgtagataatttctttgaattagaagttttacacgatttagcgatgcaacatggaaagtttgtgaacatattaattcgtgtaacgcctggagtagaggcgcacacacatgaatatattacgacaggccaagatgattcgaaatttggatttggcgtttcaaacggtcaagcgatgcaggcaattacatttgctttacaaaaatccaattataatgtgctagggatccattcacatattggatcgcaaatatttgaaacagctggttttgttcgagcgattgaagttcttcgccaatttttagtagaagtgagagagcaaacaaactatgtagtaaaagtgttaaatgtaggcgggggatttggaatacgctacacagagtcagatacaccattaactcttgagacatatgtgcgagctgtaacaagtgcagtgagagaacaatttactgtatgtgaatatccattgccagaaatatggattgaaccaggacgtagcattgtaggtgatgctgggacaacaatttatacagttggatctgtgaaagatattcctggtattcggaaatatgtatcagtcgatggtggaatgacagataatttaagacctgctttatatagcgcgcgttatgaagcgatgttagcgaatcgagggaatgatgagaatgaggaactcgtttcgattgccgggaaatgctgtgagagtggagacatgttgatttgggatattcatttaccaaaagtcgcttcttctgatttactagcagtttcctgtacaggagcatacgggtactcgatggcgaataattacaatcggattcgaagaccagccgttgtctttgcaaaaggcggaacatcgcaagtagttgtggaacgcgaaacatatgaaaatattattgggaacgatcgcatacgtattaaagagcttgtctaaatagaaaaaggggttgttcggatgggcaattccttttttgtaaaaataaaataattaaaatatatcggaaaactaggattgaaaaaaatcagaattatgataaaatacaaatacaaagcttatcaagagaagcggagggaactggcccgaagaagctcggcaacctgcttatagaaagcaaggtgctaaatccagcaaaatggaatccattttgaaagataaggtaaaatatattaccgaacagtcttttcgaaatgggaaagattttttttatgaataaaaaggggggctgttcgcgtgggtgtacgggaacattttgatgaagtatccgagaagattgaagcgatgcttgctgatatgaaatatggttcaattacaattgttgtgcaagatggaaaagtaattcagttagagaaaagtgaaaaagtacgtttaaagtgaaaagcgctgactagaaaaactagaggcggttttaacctattttcattaggttaaaaccgtctttttgcttttacagggggaaaaaacatgttgacgtatgaaacgtgggaagaaaatgttgtttcgttttcggaagaagatgaaacaaaaggcgcgctatcagtattaaagtgggcttataaagaatataaagatgaaatcgtctacgcatgtagctttggggtggaaggtatggtattgctgcaccttataaaccaagtaaatccatctgctaaagttgtatttttagatacaaatgttcattttcaagaaacatatgaattaattcaaaaagtgcggaggcgatttccttcattaaatattatagaaaaacaaccggaacttacgcttgatgaacaagagaagttgcatggcgagaaattatgggaaagtaatccgaatctttgttgtaagattagaaaaattttaccgttagaaaaatcattagcagcggaaaaagcgtggatatcgggcttaagaagggaacaatcagaaacacgtaagcatacaaagtttataaatcaagatcatcgttttcaatctattaaagtttgtccactcattcattggacgtggaaagaagtttggcgatatgtatacaaacatagcttgccgtataacccgttgcatgatgttggctatccaagtattgggtgtgagaaatgtacgttacctgtaggggatggtggcgattcaagagatggtagatgggctgggaaagtgaaaaccgaatgtggtcttcattaccaataagatgaatcttgaaataaagctaagagaggatatagaaaaatgagcatagtaaacgaattagtaaaccgtatagatgagacatatgacgtatcacaaattgaaaaagaaattaaattagacaatattgcgttaagtgatttagaactattggcgacaggtggatatagcccccttactggttttttagggaaggaagattatgattcagttgtagaaacgcttcgtttagcaaatggtagtgtgtggagtataccgattacattaccggtaacagaaaaagtcgcagaaagcctgaaggttggagaggaagtaaagcttgtcaacaatggaaatatatacggtgtcattcaaatagaagatatttttgtaccagataaagaaaaagaagcgttacttgtatataaaacaacggatgaggctcatccaggagtgaaaaaattatatgaacgaccaaacgtttacgttggaggaactattattctaacaaaacgctttgaaaataatcaatttccttcttatcatttagacccaattgaaacgagggaagcatttaaaaaacgtgggtggaaaacagtggtcggatttcaaacgagaaacccggtacatcgtgcccatgagtatattcaaaaatctgctcttgaaattgtagatggtctctttttaaatccgctcgtcggagaaacgaaatcggatgatattcctgctgatgtaagaatggaaagctatgaagtacttcttcaaaaatattatccgaaaaatcgtgtctttttaagtgtatttcctgctgccatgcgttacgcaggaccaagggaagcgatatttcatgcgttagtaagaaagaattttggatgtacccactttatagtagggcgtgatcatgctggagtaggagattattacggaacgtatgaagcgcaagaaatcttcacaaattttacgatagaagagttaggaattacaccactattctttgaacatagtttttactgcacgaaatgtgaagcgatggcttcaacgaaaacatgtccgcacggaaaagaagatcatgttattttatcgggtacgaaagtaagagaattattaagaaacggtgagattccgccaagtacatttagtcgtaaagaagtagtggaagtgctaattaaaggcttgaaaaaagaagtagtaacagaatagggagagaacgagatggatacgaatattacttggcatacagcttcggtttcaaaagatgagagaagagtgaagaatggacatcatagttttgtaatttggtttactggtttatcagcttcgggtaaatctacagtagcgaatgcggtcgctcgtaaactgtttgaaaagaatattggaaattatgtgctggatggggataacattcgccacggtttaaataaagacttaggattttctgaaagtgatcgcatggaaaatataagacgtattggcgaagtggcaaagttatttgtagatcaaggagcagttgtccttacagcatttatttcaccatttcgagtagaccgcaaacaagtaagagatttattagcggcagatgaatttattgaaatttttgtgaagtgtccgattgaagagtgtgagaaacgtgatccgaaaggactttataaaaaggcaagaaaaggtgatattaaggatttcacaggtattgattcgccttatgaagagccagagcaagcggaattaattgtagaaacgcacaaatattctattgaagaatgtgcagaacaaatcgtgaagtacttacaagagcgtagttttatatagggggataaacaatgagttatgaaaaagtatgggctaacaatgaaaaattaaatcagaccgagaaaaataaattagaaaaagatggcttagaaatttttaatgatattccttactatgcggaaaatggtttcgaatctattccgaaagaagagtgggatgcctttaaatgggcaggcttgtatttacaaagaccgaaagaagctggttattttatgatgcgggtaaatattccgtcagggattattacaaatgcacaggcagaagtacttgcttctatcgctgaagattatggacgtgatgtaatagatattacgacgagacaggcgattcagtttcactggttagaaattcagcaaattccagatatttttaaaaggttagcaagagttgggttatcttcagcgggggcttgtggtgatataacgcggaatattacaggtaatccgcttgctggcattgatgcaaatgaactatttgatacaacgaatattgtaaaagaagtatatgattacttccaacataatgaagagttttctaacttgccacgtaaatttaaaatgtctattagttctaatatttataattcagcaaacgcagaaattaactgtgttgcatttacgcctgcaacgaaagaaatagatggtgagaaaaaagttggttttcatataaaagtaggtggaggattatcagctcgaccgtatttagctgatgaattagatgtattcgttttaccagaagaagtgaaggcggtggcgattgcgattgctactatattccgtgattttggatatcgtgaaaaacgtcatttagctcggttgaaatttcttgttgcggactggggagcagagaaatttaaagagaaactaatagagtatacagggtctttacaaagtaaaggggaaagtgcattcaaaggatggaatgcaggctatttttatggtgttcaagaccaaaaacaaaagggattaaaatatgtaggttttaatgtaccggtaggtcgtttacatgcagaagaaatgtttgagattgcaagaatcgcaaagcaatatggaaatggacaaattcgtacatgtaactcgcaaaacttcattattccgaacgttcctccggaaaatgtaaaaggattacttagtgaaccgctgtttgaagtgatatctgctagcccgaaatcatttattggtcatgcggtttcatgtaccggtattgaatattgtaatcttgcactagtagaaacgaaagaaagattacgaaaaattgcagaatacttagatacacaaattgcactcgatgttccagttcgaattcatatggtaggctgcccgaattcatgtggtcaacgtcaaattgctgacattgggttacaaggggtgaaaatgaagacgaaggaaaaaggcattgttgaagcgtttgaaatatacgtaggtggaacattgttagatggcggtgcctacaatcaaaagttaaaaggaaaaatagatggcgaggatctacctgatgtactggcatcatttataagttatttcaaagagaataaattaccagccgaaacattttatgattttgtaggtcgtattggtgtagatacattacaaatagcgttaaataacgtgctagaagaagtaatagcgtcttaggagggacgatatggatttatatcgatttgaagctgtgttagtaaatagtattgttccgattgttgttgttgctcaaagtgaagaacaggcatttaagcttgcggagattgagcttgaaaagcattttttaccgttgccagaggtaaaagagatttctttgtttgaaaaaaagaagattcgaaaaggtggggcatttgttgtccatgagtagagatcagtaatacgaaaaaataaaaacttccattcttatatacgaatggaagtttcattttaatagaagaaatgaggagagatgatgggaaaggtttatattgttggagcgggtcctggcgatccagatttaattactgttaaagggttgaaatgtattgagaaggcagatgttattttatatgaccgacttgtgaataaagagctgctttcacacgcaaagcctgacgcggatttaatttattgcggaaaactcccgaattatcacacgatgaagcaagagacaattaacacgtttcttattaagtatgcgaaaaaaggaaaagttgtaacgagacttaagggcggcgatccatttgtgtttggtagagggggagaagaagctgaagcattagcaaagcaaggtgtaccatttgaaatcattcctggtatttcagctggaatagctgctcctgcttatgcgggcattccagtgacgcaccgtgatgcaagtgcaagttttgctattgtgactgggcataggaaagaaggtgctgaagaagaagtgaaatgggagagtttagcgaaaggtgtagagactttagcggtatatatgggggttagtaatttgccctacatatgtgagcaacttatgaagcatggaaaagataaaagtacgccagctgctattattgagcaggggacgacgtctatgcaacgcacagttgttggaacgttagggacaattgtagatgttgcgaaaaaagagcaaattcaaaatccgagcatgattgtaattggagaagttgtccgttttagagaaaaaattcattggtttgagaagcagacagaaaatgcttatcaagtaagtggagtgttgtaaaatgaaagccgtcttatatatatgtcatggaagtcgtttgaagacagcgaaagaagaggcgattcaatttattacatcgtgtatgaaccgtatagaagcgactattcaagaagtttgttttttagagttagcgaatccttctattgaagatggttttcgtacatgtgtggagcgtggggccacggagattattgctatccctgtttttttattagcggcaggtcatgtgaagaaagatattccgtgtgaattggtaaagcttaagaatcaatatccgaatgttaaagtgacttatggtaatccgtttggtgtatcggaaacacttgttaaatcggtgtatagcggaagtggcatcgaacaggaagataaaaatgaagtgacgttacttctcgttgcaagagggagcagtgatcctgaagtattaagagatgtaaactggattgcttctttatttcaaacaaaagagaaggttaaaaaagtagaagtttgttatttagcggctgcagagccaaaatttgaggagaagttaaaggaagttatagaacgaaaagaaaagaacatcgttgtactgccttacttgttatttacaggtttacttatgaaacatattgagaaagaagtgcgccaatatgaattggaagagataaaaatcagtccatatttagggaagaatgaagcgtttcaagatatgttaattcagaaaacgacggagttattgaaaggagatcagtatgtatccacttacagtgcgagttaatgagaaacgcgttgttgttattggcgggggaaaagttgcaggatttaaaattattcctttactcaaacagggtgcggatatagttgtgataagtccagaattagatgcgaatttagtaaaacttgtggaagaaaagaaaattcgttggtatcaaagagaatatgaaaaaagtgatattaaaagtgcttttttagttgttgcagcgagtagtgattcaatattaaatgaacaagttgctgaagatgccgctgagaatcaattagtaaatgttattacaaatccagaaagtggtaatgttcattttccggcagcgattcatcgtggtttacttaatatagcagtttctactgggggagcgagcccgaagctcgcaaaaaaaattcgagatgatattgcaaataaatatgatgagacatatgaatcgtatttagattttttatatgaagtaaggttgaagttaaaagatttacagttagaaaagagggaacgaaatatattgctccaagaagtgttgaaatcagtatatgtgcaaaacgaggggaaaagagaaagttttttacgagaattagaggaaaagattttaaaataataaaagataaagtgcgctttacaaatataaaaatataatttataatcacaagtaacttcaatagatgaaatcgatgagcaagaagagtacgtatatttgatgcgttcagagagctggggttaggtgggagcccggtacgataaaatgtacagaatgggcttgcgagaggtatgttgaacattgtagtaggcaacccgggttccgccgttaaaaggatagagtatcggaattattcctgtacttgaacaagtgggatttatcaatccaattgaggtggtaccacggtatttacattacatatatcgtcctctacatgcatatttgcgtgtaggggacttttttattttctaaaggaggtgtgcgagtatgaaatgaaagtgtataattaacaaaagtttaaatattcagaaaaggagaatttatgatgaaagaaacacagcaatggacgtcgaaaataggctttgtactcgcagcagccggagccgcagtaggtcttggtgcgatatggaaatttccatatgttgcaggtaatggcgggggaggcgcattcttccttgtatttttactattaactttatttataggtatgcctcttctaatagcggagtttgttattggacgtagcacgcaaaaagaggcggttacagcttataaagtactagtgccaaatagcaaattatatccttggattggtcgtatgggagttgttacttgttttagtgtactatctttttatagtgttgtaggtggatggattttactttatttatattatagtgtgacaggaagtttctggaatggagcagctgattatggacaattgttcggtgaaacgatttcaaatccattaagtgcgattggagcacaatttatctttatgctttgtacgatttttgttgtaagtaaaggtgtagagaaaggtatagaaaaggcaagtaagtacatgatgccgctattatttattttatttattgcgattattgttcgtgcgttaacactcgatggtgcttttgctggagtagagttcttcttaaagccagatttttcaaagcttacagcagatacgattttatacgcgatgggacaatctttcttctcactaacagtaggtgcctcagtaatggtcacgtatagttcgtatttaaagaaagaggaacatttagcgaaatcagcaacatctattgtaagtttaactgtttttgttacagtacttgcaggattagcaattttcccagcgattttcgcattaggagtaaaaccaactgaaggaccaggattactgtttatcgtccttccagcagtatttgcaaaaataccatttggtcaatttttctttattatgtttttaattttattcttctttgcgactttaacatcagcaatttcaatgcttgaaattgtagtagcatctgttgcgaaaggtaatgagaagaagcgtccgtcagcatcattattaatcggtattcttatttttgcagtcggtattccatcagctttatcatttgggattatgagtgacgtgaaaatattcgggaaaacattctttgatttagttgacttttcggtaagtaacgtattgctgccgttaggagtactagctatttcattatttgtaccaaataaaatgagtaaagagttattgatgaaagaattagaagtgacggaaacgaaggggaaaacgttatttaacatttggttcttcttacttcgttatgttattccggtaactgtaataattgtatttttaaatgcgataggtgtatttaaaatgtttgcataaaaaaaggcggggatctcccgtctttttttatgtggatgttgatgagtgtaataaacgattatatgctttataggctgtagtgactgcaaggaatgaaccgattaaaaataatactgagccgccaaatgtaaatatccggccaatatacgtctctctagcttcttctattttttgttgtaattgcgtattcatattgatcaccccgtaaactataggcatttagttatagtctatgtagaatgcctatattgtgtgaagtgtaaataaaaaacctcggtaggcaccgaggttttttataatccgatataaggagatgggtcaactgcgtttgtcttgccgacattccattctccaagatgaagttcgaagtgtaaatgttgtccgtatgattggcccgtgtttcccataaatccaagctgatcgccttgttttacagtttgtccattcgatacagaacggctattcatatgagcatatactgtcgtatatgtttttccgtttatacggtgagataaatacactacgtttccgtaactagatgataattctgaacgaataacaacgccatctgcagcggcgataattggaaccgttcccgaagcagcgatgtcaattcctttatggttatctaaagaacgtacaccaaatccggaagtttttgatccagctgctggtttgataaagccaccgatgtttgtatcatgtggtgttggggccgcttgagttgcttgagcagatttagtagcttgttgtttgcgagcctcttctgcctggcgagcttcttcggcccgtttttcttcttcaattgctttttgaacagcttgacgttgattttctaaaatgcctttggattcttctaatccttcaatctctgaatctacttttgctactttcgtatgtagatcgttaataagagtttgttgctgttgttggttattttgtaattcttgctgtttttgttctagtttttgctcagattctttcagttgttgttcttttttctcaacagcctctttttctgacgttacagcattttgatcagatgtttgtttttttacaatatctgtatcgttgtttaatattaaacttacggagtacatattatcaacaagatcggcaatatttgaagaatttgttagtacctctgtaatgatatttgtacgaggtttttcttgcatagattgtaatcgttgtttaataacttcctgacgtgtatctatgtttgtttgtaattgttctatatgtttctttttgtcagcaattacttgttgagttttgctaatttctttttttgtatcgtttaattcagcttcgtttttattaatagaagtagttaattcatcaattttcttctgtaattcttgaatttctttttctatttgttctttctcgactgatttattttgtaagtcactttgtttgccttctaattcagattgaatgttagataatttatcttgatttgtttcagcgtatacgggtgaaagtaacggggaagcaaaaatcgttcctgctgctaaaacactaaacgctgcaaatttctttttcatagttgtctgactcctttctctatgaatgttatatatcataagaagaagagtgtctatcgttgtaatcataatgtaaagaaaactttataaaattgctaagttttgtcggaatttatcatttttcaactgtaattgtcatagtacatacattttattcatatgtgtaacaaaggtatattttggaattaatctgtaaaatgaagaaggaaagtaatcgtttttatgaggtgaaatattacttggaaagctaataaaacactagtgaggaatcgttctcatgttaggttttctgacatgggtctgctttttgtcaagaaaattatttgtgttcgggcaaagttattttgttgtcagatttaaatttttgatttatgatttttaacagggacaaaatgtagtgaattgtcgaataatatgtaatactcttaatttcttagttttatagagatagaatgagagatagagtgacacatcgaagagggggttacaacaaatatgaaaagaataggacttgcatggcaaatattaatagggcttgcgcttggtattgcggttggggcgattttctttgataatccagctgttgtgaagtacttacaaccaattggtgatattttcatccgattaattaaaatgattgttgtaccgattgttgtagcaagtattgttgttggggttgctggtgttggcgatgttaaaaaactaggtcgactaggcggaaaaacaattctttactttgaaattattacaacaattgcaattattgttggtctattaatagcgaatattttccaaccaggaaaaggcgtaaatatggagcagttaacaaagacagatatttcgaaatatacacatacgacagagcaagtacaaagtcattcatttgcagatacatttgtaaatattgttccaacgaacattatgaagtcgttagctgacggagatatgcttgctattatcttcttctctgtactatttggtttaggtgtagcagcaattggtgaaagaggaagaccagttcttcaatttttccaaggtgtagctgacgcaatgttttacgtaacaaaccaagttatgaaatttgcaccatttggtgtgtttgcactaattggtgttacagtttctacatttggtcttgcttcattaattccattagggaaattactaattgtcgtatatggggcaatgatcttcttcgtcgtagttgtcttaggccttacagcgaaaatatttggaattaacattttccaattctttaagattttaaaagacgagctgatcttagcgtattctacagcaagctcagaaacagttttaccaaaaatcatggagaaaatggagaaattcggttgtccgaaagcaattacatctttcgttattccgacaggttattcatttaacttagatggatcaactttatatcaagcaattgcggctattttcttagcgcaaatgtacggtattgatttatctattacacaacaaattacattattgcttgtattaatggttacatcaaaaggtatcgcaggtgtaccgggcgtatcattcgttgtattattagcgacacttggtacagtaggtattccacctgaaggcttagcgttcattgctggtattgaccgtattttagatatggctcgtacagcagttaacgttgtaggaaactctttagcagctgtagttatgtctaagtgggaaggtcaatatgacgctgaaaaaggacaagcttatttaaaagagatttctgaaaagggtcaagcggcttaattataatatgaacaagctctcacataatatgtgggagcttttctgtatatagaagaggagcagacataatgaaacgtaaatatggtgacggttcttcgtggaagaggctaatagaaaagagttatacggttaagcaagtggaagagggaatgctcggaatactggatataaaaaaggtgagagagcctagttgtaaagaatatgatggtgaagaactttgtattgcagcggatcagtatacgtgggttcaatattttatagaagggaaaaactttgcgattaccgctatgttagatgatcagaaaaaattagtgcaatattatatcgatgtggcgaaagaatataaaatagacgatcgtggtttaccgtattttgatgatttatatttagatgtagtattattacctagcggtaaggtgtatgtattagatgaagaggagctagaggatgcttataaaagtgtcgatgtcacgaaggaagagtatgagttagcttggtacactacgaaatggatattagcagcaataaaaaataatgaattttattggatttcaatgttgaaagaagaaatagaaaagttaaaatgattgttgtattcgaatttttgtataattaccaaaaaaatctatacaaaaaataattgacttttgttttgtaagcgagtaaagttaggaaagaaattattattaaaaaataaatatgaaaccttcttataaagagaggcggagggactggccctacgatgcctcggcagcggactcgatttcagagtgctgtgccaaatccagcaagcgtgtgcttgaaagatgagaagagtgtttcttatagatgtataagacctcttctcatcggaagaggtcttttgttattcattagaaaaaggttgaaactagggagagatgatactttgaaagaaacgagaggaaatggtttagctttattaccacttgggatatttttggcgctatttattggttctggaattattacaggtgatttctataaattgccgatacttgtagcgatctcaattgctgtaggagtcgctttaatgatgaatcgtaaagaaagttttaatgtgaaagtagagcggttcgctaaaggtgcaggaaatccggatattatgattatggtattaatttttgtgcttgcaggtgcattttctgaaactgctaaaggaatgggcggagtagactcaactgttaatttagcattaactattttaccgccaggatttatcgtagctggaatctttgttattggtgcatttatttcattagcgatgggaacttcaatgggaacaattgcagcattagcgccgattgctgtaggtattagtggtcaaactgatatctcaattgcgcttgcaatggctactgttgttggcggagcgatgtttggtgataatttatcatttatttcagatacaacaatcgcagctgttcgttcacaaggaacagaaatgaaagataagtttaaaacgaactttttaattgtgttaccagcggctattattacaattgtactattagtaatagttacttcagggagtgacacgcagattaaagcacatagctttgattggataaagattttaccgtacgcaggagtactaattacagcgctacttggctggaatgtacttattgtattaactggtggaactgtactatctggtgttatcggtcttatagatggaagttacacgttagaaagtttctttaaaagtgtaacgactggaatgggcggtatgatggagttagtattacttgctatattaattggcggtatggttgaattaatccaatataatggtggtattcaatatttaatgaatgtattaacacgtaatattcgttcgaaaaaaggagcggaatttggtattgctggtttagtgagtatgacgaatatgtgtacagcgaataatacgatttcaattatttttacaggcccgcttgcaaaaaatattgcagatcaatatgaaatagaccctcgtaaatcagcgagtgtattagatcttttctcatgttgtgtgcaaggattaattccgtacggtgcccaaatgttaacggcagcaggatttgcagcgttatctccagttgaattgttaccgtatgcgttttatccaattttagttggagtatgtgggattgtttctattttaattgggtttccaaggttttcgaaagtagctaagaaaaaagagtatcataaaactgcttaatttaatatgaatgttagtaattaaaaaaagtgcagagaatagactctgcactttttttttgcgtaaagggctgaatatgactcggtcttaagtctgagttaaaaacggttcttaagctcgttatggaaagatgaaaaaatagttaagataagagtatcaaatcgaagggaggcaagcacaagatgaaacaatttctagcgtttatcgcagccggtattttggctttaattgctcttggtagtcttgctggtattgtaggattcgcaatcggagcaggagttgtatattggagctataaatcatttgtgcgagctaaatcattttttggaaagttagcttggggtattgttggtttaatcggtttatccattgcactttctcattcgccagcattaatcggtatcgctgctttagtggttttatactacggataccgtgagtggaaaaaagaaaaagatgtagttgttgaatctgctccagaaagttctaaatcatatagcaactttgaagatgagtggaacaaattaatgaaaaactaaaacaataaatcaaattataattaaagtagaagagaggaagatttataatgaaacaatctttattcggacgtgtacgcgatgcaattttagctgattttcataacgtgttagatgagaaggaaagaaaaaatccaattgcgatgttaaaccaatatttacgtgatagtgagcgtgaaataacaaaaattgagaagttaattgagcgtcataaaacattaaaatctaactttgctcgtgagcttgagcaagcacgttatttcgttaataaaagatcaaagcaagctatcattgctcaagaagcaggtgaattacaattgcacgaacgtgcgttagaagaggtagcttattatgaagggcaagtaactcgattagaagaaatgtatgcaggtgttgtagagcaaattgatgagttagagcgtcgtctttctgaaatgaaaaataaattaaaagaaatgcacgcaaagcgtatggaactaatggcacgtgaaaatatggcacatgcaaatcgtcgtatgaatactgcgatgcataaaatggatgaaaataatccattcttacgatttgaagagattgaagatcatattcgtgacttagaaactcgtatgaatgaagagcatgagcgtgacacatttgatatgaaaattgcaaaacttgagcgtgaaatgaaagaaaagaatgatgtatcgttaacgaaagagttaacaaaataatagtagtatattataaaacaggcttatgatatagtgataggagaaaaggtgttggaaagcaatgccttttcttctatgtatatgtgacaagaaggggggagctgaaatgaagaaacatttttcaaagacacaattaatggggatgctcctcatcatatttgggttcggtctttttcttgatatgatacttggacattttgaaccaggtggtctcatttttgcatttattatgcttatgtttggaaggcattatcgtaaaaagaatcgttatgtacggggaaatgtatttttatttgttggtggtatcgtatttttattcttcttattttcatcagcagcatttgttcttgtcgtatttgcttgtttagctttaattggttatcaattgattcaacaagggcatcagcaaaaagcaatgaaggttgaaattaaagaaaaagggatgatagacgaagagaagcaaatatatcgtacagaaccatatttaaaaaatatgtttgtaggcaatgtgcgaatgatggatcatatttatgaacttgaggatattaatgttcaatatggtgcttgtgatgtggaaatagatttaacaactgctatgattccagaaggggaaacggtaattgttattcgaggtgtcgttggtaatattcgtttatatgtgccatatgatattgaactttctttaaatcattctgttattgtcgggcgtgtgctcttgccaggttatgaagagacagggtttaaccgcaatgttacatttagaacagagcagtataaagaggctcctcgacgtattaaaattatttcttcgcttgtcgtaggcgacacggaagtgaggaaagtataatgaagaaacaaaaaaatatttcgtggatgtatattcgttattctatgttgtcctctgttagtatcgcactcatttgtacaattgtatatgtatggaaaagcgagcaacaagtgtatgatttattatggaaggaatccatcgcttctgttccaattggcttgtttattatgactacaagtttacttatcgggggaattgtaggatatgcaatcggttactatatagagcagcgtatacaaggattaaatacgtttctatttgaagtagagcgagggaattttccgagcgatgtttcgtttactgcagatgatgaatttcatgaagtggaacgaaaagtaatcgttctggctcgtcgattagaggagcaagctggactctttcaaaaagtaacgaatgaacgagctcattggaatgaagagatgagacaagaagcgatttctcaagaaaggcatcgtttagcaagggagttgcatgattcagtaagtcagcagcttttcgcaatgtcgatgatgatgtcagcgattaatgaacaaataactgaatttccagatgtgacaaaaaaacaattgcaacttgttgaaaatatggttgtaaatgctcaatcagaaatgagagcattgctccttcatttacgtcctgtacaattggaaggtaagaaactgacagaaggtatagaggaattattaacggaattatcgcgaaaacaacatatgaaaattgaatggcttattgagccaatagaattaaaaaaaggtgtagaagatcatttattccgtattgtgcaagaggcgctatcaaacacgttgcgacacgcgaaggcaaagaaaacagaagtgcgccttcgaaaaattgatcaatatgcgattttaaaaatcattgatgacggcgttgggtttgaagtaggggttaataaggctggttcatatggcctaagatcgatgcaagagcgtgttcatgaaattggtgggacacttaaggtacttagtttcccggccaaaggtacacaaatagaagtaaaagtaccgattatgattgagagagggggagaagtatgataaaagtattgcttgtcgatgatcatgaaatggttcgtatgggtgtatcggcatatttatctacacagccagatattgaagtagtaggggaagctgagaatggaagaaaaggatcacaattagcattgcaattaaggccggatattattttaatggaccttgttatggatgagatggacggtgtcgaagcaacacgcgctattattcaagaatggccagaagcaaaaattgtagttgtaacaagctttttagatgacgaaaaattgtatcctgttattgaggctggggcgaccagctacttattaaaaacatcaagagcaagtgatattgctgatgctgtacgagctacttatgatggagaaacagtattagagccgaaagttaccgggaaaatgatgtcccgtatgcgtcaaaagaaagagcaacctttgcatgatgatttaacggaaagagagtttgagattttgttattaattgcagagggaaaaagtaatcaagagattgcggacgagttatttattgcactgaaaacggtaaagacacatgtgagtaatatattaaataaattgaatgtaagtgaccgtactcaggcggttatttatgcatttaggcatcaattaacgaagtgataaagtgaaactttaatcagtgggaggttgttcctctcccactgattatcagccctcaccaatcgggcttttacgggcagttaatgcgggataaagtgaaactttaattggcggggaattcctcgctgattattggctcgatacaatatagatttggtgttaaaacaattgaatgtttttattgacgataaataatgtaagcgttatcattgaggtgttaacagtacatataaaggggagaatgtatatgttagttcaaactatattcggaatggataagtctaaaaaattaggggattatgtgaacgcattacaagcgctttgtgaacaatataatgttgaaacagataaaattgcgattattgaggcaacagaggaatactatttatttttagtaaagcaagaagagcactatgatgttgtcaaggtagaaacagttgatacgaatattgaatattatacgaaggcttataaaataagcagttttaatcatactgcgtatcaaatgtaaaaaaactcccttttgggagtttttttaggaggcttttacttcgtgagattcggttactaatggaacttttttcgtaccgcttaacttagccattgcaagaccaataagagctcctgctaatgctggtattagccaaccgattccttcattatataaagggataaattcaaaatatggtgtgataaatgaaactgaaataccaccttgttttaatccatcaaatacgctcactacagctgctccaattaaagcacctacataaacagagcgatatccaccgaagtatttatgaagcaatgatagtagtacgagtacaatcgcaattggatacacaacaagtagaattggaacagagattgcgataattttcgttaaacctaagttggcaactagtaatcctaatgcgcaaatgatactcgcgaacgttttgtatgaaaatgtagtcaataatgttgaaaaatattggctgcacgcagatacgagtccaacgcatgtcgttaaacaagcgagtgtaacgataagagataataggagcaaaccgtatggaccgaataattgttgtacgataacagtaagtagctgtccgccattttttgcatatccgagcgagacgctagttgccccaagccagccgagtgcaccgtatacaagtacgagccctgtagaggcaataagccctgcttttgctgtggcgatggcaatggacttacgatcattcacacctttagagcgaattgcatttacaacgataattccgaatgcaagtgctgaaatagtgtccattgttaagtagccttccataaagcctttgaagattggagaagtttgatactcttgcattgctggtcctgattgcccaagtggtgtaaatacacttttaacaaacaataagaaaatagagagtaataaaataggtgttaatacatttccaatacgatcaacaagtttagatggattcaaactcagccaaaatacgatagtaaagaagatgattgtatatacaaatagcactaggctgctagagcggattgtttctggtaagaaagaactaacacccatttcataagcgacatttgcaacacgtgggatgcccatagatggaccgatagcaatgtatacaattactgtaaagaaaattccgaataatggatgaacatgacttgcaagttgctgcattccatttccagatagagaaattgcgataacagttagtagtggtaagccaactcctgttagtaaaaatccaatcattgctggccaaaagttttcacctgcattttggccaagcatgggagggaaaattaaattacctgccccaaaaaataaagaaaatagcataagacccgtgaaaaaaatatgtttttttgatacagtgttcattgtttttcctccttttttaaattcatttgtaagaacacaaaaaactcgtccctaaagaaagggacgagttatatttacccgcgataccaccctaatttacacatgtagaaataaatctatatgtatacggctttgcaacgtacaacatgatacgtgttccttgtaacgggggacggccggtaagaacttactgtaacattcggttctacttctcggagatgattttcggttacgcgctgaacgttggctttcagcaaatcgccaactctctggggaacagttctataacgtactcgttctcgtcaatgaatttttattcaagtattctgacagtattgttgcatgttttttttagaaagtcaatatgttttttgaaagatatatttatatacggaaatatcgaaagtgatattcgttgttgtaaaggaaatgatgaattgtaaaatgggagtggaaatttgcggagaattgtaaattttatagagaaaattgatatttataggagtgaagaagggattgtttgaatttatagagaataatacaacaatccacttgctggaaagaacaaaccaaaagaggtgactgaaatgcttgcgatgggagtattatttggcattattgctataattggttttatgtggttatattattcgcgttcgtttaaacaagcagaagttttactctttcaaaaaggtagtttgttgacaaatcagtctagatatttagtatgtccgaagtgtggaagtgcacaggccagaagtggaggatatcaagagtgttgcaaaattagattatgaaagaaaggaagcctcacattattttgtgaggcttccttccttacaacttcatggcgctccaaattgtccatcgatctctttcaataataggagagacgttttgtaatgcggtctgtatatgttgtagaagttgagaaagttcatcatctgttaactcatatagaatggatcgacctgttcgaggagataaatcttgcaataatgtttctacagaatcatgtatttttcgtatttcccattgtgtttgtgtgggaagtacatgaagagaatgtttttgtaattctgtctgtatagtgttggtttttggacgtctttttgactctatttcaataagttttggaaatagagagaaaaaatatccgcgaatgtgttcgggacttcctggaattgtacaatcttcaattgttcgatcttgtaaaataagtacaccgtttttatttaatatacgagaagcttcacgtaaaaatgtaggaatgtcttgtaaatgatgaataactgcacgcgaaataactatgtcgaatgtttcattagggtatgggatattatgtgcatcaccgtggatgaatgaaatgtttgaaaagttgttacaattttcttttgcagcttgtaatatttcttttgaaaaatcaagtcccacaacattattggctcccataagagcgaattctttcgtataaatcccaccaccacagccgatatcaattatttgcttgttttgtatttctgtaatgttttttaccatttcagcccaagaaatatgagcgtttcttgttgcatatgtgtacttattattttcatcatgaaaattaatggacatgataaagacctcctttcaatgattagtatagcgtatttaataggatgtcacgtttttgttttatgtatgaagattataaggatttcttatcgtaagaggaggattaatttgaaagggaaatatgtattggtgttgttgtttgttatgttactagcagcttgtggtcaagttgaaccgaaaaaagaaacaaaaaaagtagaagagacggtgaatgaagtgaaagaaacaataggggtaaccgttttacaaaaaaaacataaagagaaaaagttgcaggaatcagaagcgaagttagtaatagacattttgaataaagctgagaaacaagaaataacaggaagcttcggtgaacctgaatatgaaatacaaattagtagagatgggaaaaaagaaacttattatgcatggttaaggggagaagatagacgaggatgggtgcaatataagaaagctatgtatatgttgaatgaaaaagatacggaaaagcttttggatatatttccaaatgtctcagaacaaaaagaagatgagatgcaggtaagccctttaacggaagtaacaaaaaaagatttgcagattaccgcgtttcatattaaaacaggcgatcaaaacgtgaattatacggtacggtatacgatttcacaatcactatacaataagttagtgaaggagcaagaatattatttgcaactcaattttccagaaaaagttcaaaaattaattggagcaaaagagagtgaaatgattttaggtgaaaaagtaaaggaagggtataagcaatatgaattacatgctactgttccgataaaaagcgcttcagaatcacaattaaaatcattagaaacatattacgaaagttatgatttgaaaatattaaacagtaaaaaagaaaaaataggtgtgtttcaaaatataattcagattgttaaagattatggtgaaaaaatgaattttcaaagataaagtgagactttaattagcccttacggattggaatgaatataaactcgtcaaatctatatgacctttcctaggaaatgataatagagaggggaaagcacccctctctattactttgcttttgcagatggctcattcattgattttcgtgtaataagaaaagaaatcataagagcggaaaggatgacaagggcaataaatacgtgattgggcaacaaatctaataataatacgtaactaacggtataaaaaataagagttgaagctaaaaacgatagagcacctattataagagattgtaaattcatttttgtacacctccttttatttatatttttggctgaaaatggattatataaacattatttctaacaatagaaaaaaatatgtcataatagagaaaagaacaagctttaatgaatgaatatgattcattaatgagagataaaggagaggaatatgaaaaataataaaaaaggattatggggaattattgttgcgataggtctatttttactgtctaagttaaagtgggtatttgcaatttttaaattagcaaagttttcaacggtatttagtatgtttctatcgcttggcgcatacgcagttctatatggttggaaatttggagtggcgctcatttatttgttgtttgttcatgaaatgggccatttatgggctgcgaaaagaaaggggatcccaacatcgccagcaatctttattccatttatgggggcccttattggaatgaaagagatgccgaaaaatgcgaaagatgaagcttacattgcctatatgggtccgcttttcggacttctgtcatttttaccagcgataccgctttatataatgacgaaagagccattttgggcgcttgttattttgcttggaagtatgattaatttctttaatttaattcccgtttcgccgctagatggtgggcgaattatttcagttgtcagtactaaaatttggggggcaggccttattttattacttggctattcaatttactttaaaagtattttgggaggatttattgttattatcggttgtatggagttatatagagtaataaagagagatgagccgattaaggaattagggcataaaattgatgggatgaaagaatatgttactaggcttgaagaggaattaaaagaaacgggtgctgtacatcggactatatacgtgatgcatcatgagatgaatgcattaagacaaagagaacgggaaaaagagttacaaataggtgaacttcaaaaaatggaagtgttagagtatcttttaccgaagttcgaaccgttagattatgttccatatgaagatgaaaaagatgagtatacaattcacataagggaagcatttgaagcgtcagaaagaaaattaaatgaatggaaaacagaaaaggaacaacaagaaaactattataaagtggatgcgaaaacgaaatggacagtatttgcttgttatatcggattaatggctatactcggttacacagcttatgaaggatatattgttttacaagaacatttgccaacgagaaatgtatagaaaaatattgtcgaaatgataggaagaatttatacaggaattatatttctacgagagaaagttacaagtatagtcatacattgtaatatttttagtagagaaggagttctgtatatgaagaaattgttaagtgtattcgggattattatcgtgatgatcattgcaagctatagtcttatgaaagtgctgttacattatgcgaataagcctgctgaggtaaatacaatagctcaaatagaagatgtgcaagaagagacaaaagtgctaaattttattcgaatgacacatgaaagctataataatttcttaaattacggtaaagcagagaattatacagacggggatttgaatcaatttaagcaatggtttcaacaacaagaatcatcgttaaaaaatatacatacagaaataaagaatgaaaaaataaaacgtgatgtaaatagaagctatgaaattgtaaaaaaaggtgtggaacttcaaaatattgagtatgtagtgtatgcccaccgtgtatatcatgacttggatattatcgtaaataaatatagaggtgaaacgaatatctggggatatacggagtttggcgatgggaaagatataaaagtaattgaacaagctatacaaacaaaataataagctagctagaattctagttagcttattttcttttgtaaatacaatgttcatatattattcacaaaaacaccgtgttaatagtgattaaaatcacaatctgcattataagattcagttaaactaaaaacagttaaggaaatagaggagtgggatacaatgttaagtgcaaaaacaattgaaatcgtaaagtcaacagtaccattattacaagaaaaaggcgttgaaattacaacgagattttacgaaattttattttcggaacatccggagttattgaatattttcaaccatacaaatcagaaaaagggaagacaacaacaagcgttagcgaatgctgtttatgcagctgcaacgtacattgataatttagaagctattattccagttgtaaaacaaattggtcataagcatagaagtttaggtattaaagcagagcattacccgattgtaggtacatgtttactgcgtgccattaaagaggtcgcaggtgcacctgatgaagttttaaacgcatggggagaagcatatggtgtcattgctgatgcattcattagcattgaagcagagatgtatgaagaagctgcacataaagaaggtggatggaaagacttccgcaactttgtgattgttaaaaaagtgaaggaaagcgatgttattacgtcattttatttgaaacctgaagatggagggaaagtttcttcattcatcccaggtcaatatgtaacggttcaaatcaatattgaaggtgagacatatacacataatcgtcaatacagtttatccgatgctcctgggaaagaatattatcgtattagtgtaaaaaaagaaaaaggtgtagatacaccagacggtaaagtgtctaattacttacatgaacatgtaaaagaaggagatgttttaccagtaagtgcaccagcgggagatttcgtgttaaatatggattcaacattaccagttgtactaattagtggtggagtagggattacaccgatgatgagtatgttaaatacgttaattgagcaagattcaaaacgtaatgtatattttgttcatgcagcaataaatagtaatacacatgcaatgaaagaagacgttaaggcagtagaaaatgaatatgaacaagttaaagcatatacttgttattctgcaccgactgaaaaagatttagaaatgaagaactttgataaagaaggtttcattgaaagtgaatggttaaaaactattattccgacaactgaagcagagttttatttctgtggtccagtagcatttatgaagcatataaatgctgcactaactgatttaggtgtgaaacaagagcatattcattatgaatttttcggcccagcaacaagcttacaataagcaaaaaaacgaggtatttattttacctcgttttttatttgttctcgtaataaacggtttactgtttcacgacgtatacctatcagttgaccaatttcggtttgtgttaatatttcatatataggaatgtcacctaaatatagggtgaaccattcttgtaaacgatgaagacgttctttcggagagacggttgtcaattgatcaattcgttgttgcatcattcttaatttagattgcaattgcatagcgatgttagcatacgattcgggatttgcttgaagtctctcgtaccattcactactagtgatcggttccacttctgtttttattaaagcgatagctgtaccgtgatattctttcggtgaaattaaagaatgatgaggtatcgtttcacctggaacgataatgttgaataaaaatggtgttccgtcttcttctagccgaactacttttaataagcctgtttttataaagtataaaggaccgtcctcgccttgacggaatagtacatctcctttgtgtagaatcaatgttagccccccattaatatgtttctatttcttctattttagcgtatatgtatatagacaatatgctatttcaacagcaatttcattgacgaaatgtatgctattacagtagtatactatttagtgtgtaatagtactagcaatgaatacgctgtagggggtttagtatattgttagatgcgatgagaatgacggatatgagaattccggcgaatgctatcattcatgtagaagagatgaaaggtggagtcgttttatccgttgaagtagacggccaaattatttatacgatggcttatgatgaagaaacagatagctatgctgaattatatgatcgaaacgataagagggcgtgccaagtacatgaagacttcatggggtggtcacttcttcattaaaaaagatgtcaatatgacatctttttttattaaatcgatagaatatacaaagaaatgaaatataaggataaaatttgtaataattgattttgcattgttagcactctgtaactgcaagtgaactattttttcgctatcataaagataacagtcgcagttataggagtggtcaacttgaagaaattacatatttcaaattatatgttattatgtgtttgcttaattttatttgttctcctcggaggatttttatattcatgtgtataagaaaaacgcattctaaaaagaatacgttataaaagggaaataatgattaatctagttccaagaataatcaacgtaatacgtaataaattaattacggcgttaccacttagttttgtattaatgtaagccccgatttttccgccaatccatgcacccggaatcaggattaatgcataaatccagctgacatttccaagtgagatgtgagttgcagaacttacaattgctgatagaaatacgatgaacattgaagttgctactgcaatatgtgctgggaatgcaaaaagaagcatcattgctggaacaagtaaggcaccgccaccaattccaaataatccagatataaacccaactataaaggcgataaagatagcaagaaacggtgggaattggtagtgtacagtatttccatcattatctgtaaaagaacgcttaattacagacgtatttgagagggaaagaggttttaatttgtctcgaagcataagtagaattgagacgaatataaggaaaatcccaaagtataaagaaaatgtgtcttggtttaaaaatttatttgcccatgatccgataataccaccagggccgcttccgataaataaaataagtccacttttataatctactcgcttatgcttcatgtaagtaagggtggaagatagtcctgtgaaaacgactgttaccatagaagtccctactgcaagttgtggtgataaactgtgtaatccaattaataacggaacaataataattccgcctccaagcccaactaggctgccgactgttccggcgattagtccgatgaaaagtaacatgatgtattccaaaattgccaactcctctaaataacttatccaccaattattatacacgctttttaaagagaaataggcttgttcacaaaaaagtcgtcttcctagaaaaataaggaagacgacttttgattagaaaacaaaatgtaataggtagtaaaacagagcagctaaagaagctgaaataggaagtgtaataacccatgtaattaacatgcgttttgcagttccccattttacccctttcacacggtgagaagcaccaacccctaaaatagaagaagagataacgtgcgtcgtactaaccggtaagtgaatgaatgttgcaccgaaaataacaagtgatgatgataaatcggcagctacaccatttacaggacgaattttcataatttgtccaccgacagttttaataattttccatccgccgacagaagtaccaagccccattgcgatagcacaagataattgtacccagaacgggatatcgctagaagtatgatagttattagccataagagccatcgtaatgattcccattgctttttgtgcatcattcgtaccgtgtgtgtaggcttgtaatgctgcagtgaaaatctggaatatacggaagttcttattcgtttttgttaagttaaagtttttaaatactactttaaaaatactgtatacggtataaccaataacgaaagcgataatcggtgaaatgattaaagcttcaataattttaataaatcctttaagatttagcgagctaatcccagcggccgcaattgctgcacctgcgattgagccgataattgcatgcgaagaactacttggaataccgtagtaccaagtaattaagttccaagctattgccgcaagcaaagcagctaaaattacaagagaaccattttgtaaggcgaatggatcaacgatatcttttgtaatcgtttttgctacacctgtaaatgtcattgcgcccaaaaagttcataatagccgccataataatggcatgtctaggctttagagctttcgttgaaacagccgttgcaatagcgtttgctgtatcgtgaaatccattgataaagtcaaaagctaaagcgcaaatgactactaaaacggtcagtatcaagagtgtatccatgatcaaactccttacgcgttcttcataataattgtttctaatacgtttgcaacgctttgacagctatcagctacttcttcaagctcttcgtaaatctctttaaattgaataatcttaatcggatctttttcacgagagaataagttcttaatcgcatgacggcgaatatcatcacactgtgattcataatccttaatcttaatcgcatttgtacgaatgtcgactaattttttgttagacattaattcaacagagtttgcaatctcaatcgcacattgattaattgcttctacgaatttaatcatgtattcatctgcttctgtaatagaatacatttcgaacagaccagcactgtgatctaatccgtctaatacatcatccatactcattgcaagttgtaggatgtcctcacgttcaatcggagtgataaacgctttgtttaactccataatgatttcgtgaataaatgagtcaccttttgactcatactctttcatgcgcatagaaaactcttttaaatcgctagcatttttaattttatactccacgaaaaactgcgcgccttcttttaaattttcggaaacattcattaacatttcagaaaatttatctttttttgatttaaagaccattattgttacccccacaaaagtaatatatgtaaaatatattggctaatcaattctaacaaaaaactgtcgttttttaaaacattttatcgaaaagtttacaaaaacttaacataactctcgttgttctattaataatattaatatccaatagtgaatatcttacttgtagaatgtccttttcttgcaaaaagtatgaatgtaaaagaaaagctttacactataggaatgactacgttattataataaatttaaaaggcggtatattcttccttttaaaaagaagagtgtaaataaatgaaggaagtgaacgaatgaaattgaagaacactcattttaaaaaaatgcttgagtggttcaataagaggaagaaacttcgtaattcattaattgtattgggaagtgtattcgttactctatttattgctgtaaatataataatttccattcaagacatatctgaactaaaacaagctgttccacaaccgactttaatttatgatgcaaataatgaggtcgcaactaaattagcttcttcgaaaacagaaggcgttaaaagaaaagatattcctgatattatggttcaggcaattgttgcagtagaagataaggaattttttaaccatcatggtatttattatagtggaattataagtgcggtttttaaaaatattacagcaggagaagttgtagctgggggaagtacaattacacagcagcttgcgaagaatgtatttctgacacaagatcgtacattttctcgtaaaataaaggaatactttttaacaaaaaaaatagaacgtacttatacaaaagatgaaattattgaaatgtatatgaatcaaatttattttggggaaggtgcttgggggataaagagggcagctaaatcttattttgataaagaggtaaaagatttatcaatttcagaagctgcaacgattgcaggcttaattaaagcaccatctgcatattcaccttataaaaactttaacaagtcaattgaaagacgtaatgtcgtattaagcttaatgaaagagcaagggtatatttctgacgaacagtataataaagaaaaagagagcggtcttgtattaaaacgtggtgtggatgataaatacaagggaaaatattctcaatatgtagactatattgttagagaagcgatggacaaatacgaattaacacaaaatgaaattttagcaggtggttatcgtatttatactgagcttgatccgaaaaaacaacaagctgtagaagatgttgtgaataatgatagttatttcaaagatagtggctcagatcaacttatgcaaacaggtgtagtccttataaatcccaaaacaggcggtgttccagctttagttgggggtagaggaccatatcagtttttacaatttaatcatgctacgcaattaaaaagacagccaggttcaacattaaagcctctagctgtatatgtacccgctttagaacaagggtatgaagtatacgatatattaaaggatgaaccatttaatattaaagaatataaaccacaaaatagcgatcatacttttcacggtgatgtgacaatgtatgaagctgtggcaaagtcgtacaatgtttcggctgtttggctattggaacagattggattagataaaggattgaaatctttagagcgatttggtattccattagtgccagaagatcgtacgtatccaatcgctttaggcggtatgcatgtaggaacatccccatttgtaatggctcaagcgtatagtacatttgcaaatgatggtgttcaagtggaagctcatgcgattagagagatacaaaatgcggaaggtgaaacgattggaaagtggtataagaaagagacacgagtgacaagcgagaaaatttctcaaaagatgacatatttattaaaaggcgttgtcgaaaagggaacgggtgaaaaggcgaaagttaataatgttgatacggccggtaagacaggaactactcaaattgtaaatggcccaagcaccggcgcaaaggattcatggtttgttggatacacaccagatttggtaggtgcgatttgggtaggatatgataaaacagatagcgatcattatgttccgggtggtagtcaaattacgacgacaatgttccgggatattatgaaaaaagcgaacgcaaatccagctcaaaaagcatttcagttatcgctcatatctgaggctgattataaaaaacaattgactacaatagaagaggaaaaacgaagaaaagaagaagagaagagaaggaaagaagaggaacaacaaagaaaaaaagagcaacaagagtggattgataaagtgaaagaatggattccttcattttggtaaaagaaagaggcgaataatgaaattcgcctcttttttgtatgaaaaacaaaatgaaactttaaacgattgaaattatcccttctccgtactagttactactcgttaagtataatgttcgtattgccaaaggattgagaatcgtatgtgacaattatttttcctttactaataggttcgtaaggtaattcttcttcgtaattaccattattttcattgtggatagaaagtgtaatttcatcgatttttttatttgtatactgatctttaatcgtttcagcaatttgaagtaacgcttcggaactagaagctttcgtaataagcattcccgttataactttcttttcattttttgttgcattggaataagggatgttgctttgtttcgtatacaaaattttgtatggaacagtttttctatctgcttttgaaatagtggaatattttagagttaaaaaaaatcctacacataaaataatgcataccataagagcaatccaaatgcgtatcggtgacataactctcatttttcatccctctttcatatctttgacttcattatttatcatacaaaatgaggattaagatagagtaaatttgaggtaaagaaacgtaaagaaggagcacttatcctcccaaacaagtgctcctttttattaaaagagagatttaatagacaatcaaaatcacatctattacttataaatgtgcttagtcctcccaaaatattttcggaaattgtggttagtaaattcggaagacagatagtgtcgcagttgtatcgcccgcaggtccttgagcgccttgaggtccttgagcgccttgaggcccttgagcaccagtagtccccgtagttcctccgcctaggcaaccaaatccatattgaactagaatagcttgaccaagagcttgaagaagtctaacaaattctgtaagttctgacttagggatgttaatatggttacatgctcttacttcgcaacaatcattaccataaaatacttttcctttatttttattgttcatcttttcattcttttctttcatagaatcatcagtcattactatatattaaaatgaaatttatactaaattcgtgatggacaaattaccatttctaaaaaaaataagaaattggcccacctacgaaagaaataagtaagatatagagaaaggtttatataatgtaaagaagaaaagtgcaacataaaaaactacatgctaattgttgggagtgtttaacaattggcatgtagttcgtggattagtcctttatttacattgatttaatttttcaagggttgttttaggtaagattggaattgaaatagtgaaagttgtaccatcttcattactagtcatttttaatgtgccgttatgattttggatgattttttttgttactgacaagcctagtcctgttcccgaatccttcgttgagaagaatggatcaaagatatattcttgaatagctggaggaataccaattccattatctgtgaaagtaatccgaatgaagttattaaggcgataactagtaatttgaatagaaagaggtttgtcgccttgagcatcgacggcattttgaaatagatttaaaaacacttgaacaagttcatgtcgatcaatattgactaaaatatcatctaattcattagagaagttataatcaattgaaatattatgcaaggaaacttcactagctagtaactgttgaatatagtcacgtaaaaatgtattgatgggaaacggttctcttgtaaattcccgtgtttttgaaatggctaaaaattttgtaataatattatttgcacgatctaattcagggataagcaagtttttaaataactctttatttgatggagaaatgctttcttgtaaaaattgtaagtatccgcgtactgttgtaagaggatttcgtacttcgtgtgcaattccagctgcgattcgccctgctaacgaaaacttctctgcatcacgttctgtatttaaataatgaaagacactaataactctaaaaatctccccgttataatcgcgaataattcggttatttataatgccatagtttttgtctaaaacttcttcattatatatttctgttcccgtttttaatgtttcaattgctttaattttttcttccggcaagtttagtaattgttgaatcggttttccgataatatgatttcgtattataccgaaatcatctgcagcaacttgattacataaagtaatattccctttactatcgataaaggttacatgatgtgaaaaggcatcaaaaatatgtacaaagtgtttttcaagttgttcaaataaaaataatgaatcacaagtaagttgaaaatgagcctctttattctcttttggtatttcttgaatggaatgagtcgttctagttttctttattcgtaaaccaatatgtggatttttgtatgtgaaatgatgtggtaattgattcacaagttcttcataaaaacgtactttattttctagttcttcaattcgtttttcatgagatacagtagcatcgtttggaagcataaataaataacccctcattttaaaaattcttccatatagtatatcatatttttataaggatactcttaaagaaaaggctacatgatgcaaagtgtttggaaagtgaattgaagatgaagttaaaagggaggggtatatgtgctgtttattggagtgacaggatggggagatcatgattctttatacataaatccctatgaaaatagaaataaattacgaacatatagcgagtattttcctattgtggaagtggatagttcattttacgcgatgcaacctgcacgaaattatataaaatgggcaatggaaacgccgaaagatttttcttttgtcgtaaaagcgtatcaaggaatgacgggacatatgaaaggtgaaattcctttttctacgttcgatgagatgtttgatgtgtataaacagtctattcttcctttaatagaagctgataaattaaaaacaattttatttcaatatccaccatggtttgattgcaaaaagaaaaatgtagattttcttcgatatacgaaagaaaaaatggaaggtttaccatgtgcaatagaatttcgaaatcaaacatggttttatccagaaatgagagataagacgttacagtttctagaacaggagaaatggattcatacaatttgtgatgaaccacaggctgggataggttctgtgccactcgtgttagaggttacgaattcagacatggcattaatacgttttcacggtcgaaatgttcatggttggcttgataaaggggaaaattggagagcggttcgctgtttatatcgctacaacaataaagaactggaagaatgggttgaacgactagagcaattaaaaaagaaaacaaaggatatatacgtactgtttaacaacaattcaggtggggatgcagcagataatgcgaaacagcttatgaaaatgatgaatattacatatggtgagccgaagccggagcaattaaatttttttgaatgataataaacaagaaaggcactgtacaaacagggggaatgtacagtgcctttctatatgaaaaagaggggtaacaatgttactgagcgtttggttgattcatcaattgttggcttcacaataaatgataatggttatcattatcattgtcaatggtttttctaaaaatatataaaaaactttatatattttaaatagagataaaaaaagaacagcgattaatgctgttcttttccattgacgaattgttgtaaatcaaaaggagttatcgcttggataaattcttttgagataagtgtttgaacgagagtgctctcagagatagaagcacctgtcttcttttcataagcttgttttaataaatcaagtttttcagccgtttcttttggtaattcaattgtaagtgtgttcataatttctcccccttattattagagtaccactacagtataggagagacaagaaaagagaatacgaaatataaaaaaggttaccaaattttaaaatggtaaccttttttatgtataagagttattaagcaataccgatatactttaaagtttttgatggagtactgtgatcaaagaagtgttgtaaaaacgcaatatcaacacctgatttgtatgcacaataaccccaagtttttcgaagtgtatgtgagctaatcccttctaatccaacttcttttgcggctttgtttaaaatgtaccatgcatgttgtctcgtaatagattttgttcctttttgagattttaacaatggttcattacgtttccaagttttacgttctttcatgtagtcttcgattgcgtgctgtaagtcttcatttacagcaaaccatttatgtttcttcactttttcattgtaaaataaaatggaatggcgaacattttcattttcatcgattacatcactaacttttaattgtaagatttcacttacttttaagccagaatttacagctaatacgaataataagccatcacgtttcgaagattgtaaaagtatatttttgatagtttctaattgtttttcattttgaataggttgtcctgcttgtttcatttcacgcactctcctcttttatatgtgtaaaggaaaggattaacttgtttcttactataaagggagagtgtgaatttcatgtgaactcctagtgaaattaagacaaattatttgacttcttttactttttgtaaattgaaatagaatacaacactgttagtcgtattatacacaccatactcggcatgatggaggtctaagatgttttttacaatagataatccgagaccggtacctccggtgtgacggctacgtgatgcatctagacgatagaagcgatcccaaattttttcaagactttcttcagggatagggtttcctgtattctcgatttcgacttttacggtatcttctgcttctataatggagacttgtattttttctccctctggcgtataacggattgcattacttagtaagttcacaactacttgttcaatgcgactgcgatttgctttaacaagtatagaagggtctgcatcgatgttcacttgtaaatgtttttcttccatgctaaataataattttgtgtagacttgttgcgttaattcaccgattgagaacgtcgtcatatctagtttgtaagtaccagattccaactttgctaattctaacatttcaacaatcagcctgttcatattttctgtttcttctaaaataacatcagtataatacgaagtatccttactaacaccatctttaattccttctgcaaaacttctaattacacttagcggtgtttttaattcgtgtgatacgccagaaatgaattcttttcttgttttttctaattgacgttcacgttcaatatcttgttgtaactttgtattagcaacatttaatcgatcgattcgatcttttaaatttacagataatgtattgatactgccagaaagcccgccaatttcatcgtcagctgtaacaggtaatttctcgctgaaatcaaaattagccattttttttgtaacacgatttattttaattaatggcttaacaatgatttttgagtagtagaaggataacaaaataattacgagaaacacgatgattaaggcatagacataataatcttttaaaacgagcatcgcttcattaacaggctgcaaagatgctatcgcaaaagcgtattctgtaatccttccattttctataatcggttttacaaagatactattttttatattttctccgccatctaatatgaaagtacttaattggttcgagttagaagttccctctctaatcatatctgcaaaatattgaacggcttgtaatgtttcaatatcatttgcaagacgaacctcagctttggatgggagctgtaacttagttataacacctgtaaagacgattcgagttgtagatttgtatcggcttgcaagtctgttcttagaagggttaccattaattgactgaaaatccgaatagaaatgttcgttctgccattgattataattcgtccctaatttttgtggtgtgattatattattctcttgtacgactccatcaacattgattattacatctttttttaaacctaaattttcgaatttattatattcttctggtgttaaaagattattgagtggaatggaatactgtttattattgttgggattaaatacatcgatatagtaattgttatcacttttaataataccgttagagtccaaaaactgcatatcggcatttgttttatcatgaaattcttgttttagttttctaacctgctcataatttttatcacttttatcataattatctacgaatttttcaaaagcagtttggactgtttttactttcttattaatataaaatttctctaaaaatagagattgtcctaggaaaaaaagtaggaatatgattgtaaataaagtggatgttaataaaaatagtttaaagacgatacttctgtttttcactacgtcacctcttatgagaaatactgtaaatgatttctttatcccgctttaacgggcaataagactcccacttcaaaattcggcgaatacaagggagttaagtgggaaaacaattgcccgtaaaatccgattggttcaactaataatcagtgggggatggaaaaaacctccactgattaaagtttcactttattataacaaacgttacaagaaagtagaggggagaaatctgtctctttataaagtagttatttataaaaagtcacataaaaagaactcgccagacgtatgacaagttctttagtgtattattgttgaattgctgcatctaaagcgatttcaatcatttcgttaaatgtagtttgacgctcttcagatgttgtttcttcgccagtgaagatgtgatcgctaactgttaatacagataatgcatttacaccgtatttcgctgctaatgtgtaaagagcagttgtttccatttctactgctaatacaccgtaatctccaagttttttaaccatgtccatgctttcacgataaaacacatctgctgttaaaacgttaccgacacgaacgtgtaatcctttttcagttccagcatcataagctttctttaaaaggtcaaagtttgcagctggtgcaaaatcaaatcctgggaatgttaaacggttcatattagaatcagtacaagccgtcattgcgataataacatcacgaacttttacatctttttgaattgcaccgcaagttccaacgcgaattaaatttttaactccgtagctttggattaattcgtttacataaatagaaatagaaggaacacccatacctgtaccttgaacagatacacgttttcctttataagttccagtaaaacctaacataccacgcacattattatagcaagtaacgtcctctagaaatgtttcagcgatatattttgcacgtaatggatcaccaggtaatagaatagattcagcgatttcgccttgttttgcttcgatatgtacactcataaaaaagtcctccttataatgtattgatagaaatcaatatcatttgcattatacactacgaatcctttcaattaaaatctttttattatttgtaatatgtgcaaaataggaggatttcataaatcataatctagaatatatatcttaagaagttttgtatgaatagagacaataaaaatggtaggtgatgttttgaaaaatcttgtcatcgggcttattgcgttagtacttattgtggcaggaggattttacataaaaaaatatcaagaaaacgaagagactgtaggagatgttcaggaagtaaagtgggatgtttcaaatggaaagggaaatgagaaagtagatattgtatttcagttgttaaacaacaagaataatgaaattcgtggtgtaaatgatcaaatgcgggcagtgattgtagatggacagttaaaaaacatacaacaaattaaacccacatttgcagggaacgggtcatataagttatcttccaaaatagcgaaagacgaagaatatacaatatttttatacgaagataaaaataagtccgtagagtcattcgctaggaagaattttggtagaacgaaagaggagaacaataagaaaaaagtgaaatttccaatcgacagtgtacttacaaaaaaaataggagagtatgaagtttctcttttatttggcgcattacatccgaatgaaccagttacgttaacatttcagtttcaagcgaaaaagggtgaaaaattgaaattgcattcagagagaggagaagtagagtcactctatatagtggatgaaacgaaggagaattttttatacgctatgcctgtagatacggatgaacaattacaataccgaattacatttcctgccgagggcacgtataaaatgtgggggaatttctatataaatggtaagaagtatgaaaaagaatttattgtacaagttcaaaaaagaaaaaacagctaagaatttagctgttttttctttttcctattaattttgttacagagagcattgtaattggtaaagaatgattcttcctaaatgctaaatatttaccgctccatgctggtttatatttttctttaaaatgtcgtaatccgctgaaactatacgtataacgaacgttattaaagattgcagcagccactcgttcagaccagaaagactgtgtggataaaccaacatttgaaagtggtgccataccgatattaaaggagtggtattcattttcttttgcccactggaataagtggatgaaaattgcgtccataatgccgctaggcgcatctggataatatcgcattaaatcgacagataatgatccgttttgatatacaggcatgaatgttgtgaatgcaatgatttttccatccgaatcagataatgttgcgataggagcgcgactaatatattcacgatcgaagtatccgagtgaaaaacctttctctttttttccaccaagccatgcatctgaaacttttcttaactcttcatataattcgtcggagaaaggtggctcatgaatagagaatgtatagccttctctttcaaaacggttgaaagtagctcgcatgccagcgcgtttctttcctgttattgtaaaggtatttaaatcaacaacagcttcttcaccaagcttaaagaagttataaccaaaatcgtggtataaactcatccatttactttcaatttgatagaatacacaaatgtatccaaatcgatcagcctcagctaaaaactcttgcaatacagtacgataggaggaagggtccccaattggatcacctagtacaataagtcgttttccagttattgagaagagaatgagtgcttttccatcactactgaaaaagaactgtttatctcctaaaaaacctaaatgactaagtacatttccaccatgttcatctaagaagttttgtaatcgtttatcattagctggttgcccgggaaattcatttcgataacgatttgcaatgagtgaaccaattagtaaaaaagtaggaacaaaaaaggcagctgctaatgcacttcgtttcacttgtgtaatattacgaacgacaaaatcaggtttgaaagcttcttttgcacctgcaaataaaatacctaagtttttatataaatataacgttacaagtaggaatataaaaacttttacgatatcggaaagtgagacttccattttctcacgtacaaaccttttacgaagcatatacaatacagcgagtacgattaataaaataaaagtttcttcaacatcaattccttttagtgtgttaaaaatagccgctccgattaaagaaacaatcgtcatataataagaacgttttgttccgtaatatatcccccgcgaaagaatgaggaggagaataccgaatgttagcgataagctaaaagaaaattgaataagatgttttggagctagaatatgtaaggcgtgtgcccgatttatacttgtcggtagaatggttgataaaataaccattaagccagcaaatactgttaaagcagcagatgcccaagaacctaactttcctagaaagtcacgctgcaaagtccatataacaccagttgtctctaatgcaggcgcaataaaaggtttatcttcaaactttttaatggctactcctgtcatttcaaaagctgcaaaaatgagaccaaggcagaagggcaagatgtaatagacgagacgatataataacatagcagggagtaaaacacctgtatcgatgccgtattgcccaagcccagttaagaagacaagatcaaatgatccaaggccaccaggaacaagactaacgacaccagctaaagcagcaataacatatacgcctaaaaacttttggaattcgatttcaatgccaaataatagtaatatgacgtacataacaataccagcagatacccattcgactaatgaaactaatgagtataaaacagttgggtttttctcctcttcttcttcttgttcctctgtttgcgtcgcttttctattttttaatttagaaaatccgatatatatagggacgaaaagagcgaagaagataagaacaggccatagccatggtttttcatgcaaaataaatctcgtgtctaatattccgatgagaccaagaaatgaaagaatggctaatccattaataaaggcagttgtcatccaagcgatacttttaataagttttccattttcttttatatatggacgataaagcattgtgcgtacgccggctccaacaagaccaccaaacccgataaatccatttaaagtattagcaatccacgagatacggaaaatcttttggacagggatatcagcttttaagtaacgaagcataacatagtcataaaagaacattgttgatacagcgaatgcaccaagtgtaattgctaaaaagactcctccagttggaatgtttttaattgtatcaatcgcttctaaaaaagaaatgcccgctaattctttttttgcttgaaagaatacaattgttaatacaacaaatgggaagacaattttcccgatttgtaagaaacgtttccatgaaaacgacataaatacaactctccttgtataagaaaactgagacaataatattattatgacaaacttcaagaaaaataaaaaggtaaattcctgtataggcgagctattttttatataggtatatttaaaagaatattttgtttatcagaaaattaagttagaataagatgaaagaaggaggaggggagtatatgattataaaaggttatgtaggatatgagttagaaaaagcgaaacctaatacatcagaagatttttttaacagatctgaagtgacatatatattaaatggtaaagagaaaactttttcggttttatacgttcgatattttgaagaagttttacaagaaattactccttttgaaggaaatccagtgtataaagtagaagaacaaaacatatatttgcgtgatattgtagcgatatgttgtttagtgaaagataaggagcttcgtgcgcaaaaacgtttgtatttaaataatatggaagaatttcaacaatattttgatgagggaacggtgtcgaaagtacaagaaatattggctgaattacataaaaataaaagagtagaaatagcgtgaaatggcaaaggagagagaaaaatgtctaatttgatggttgaaaatcaaacagaacaagtttctatatttttagaagatgctattaatttgataaccaattatgtaaattatcatacgttaccttctttattagaggaaacaccagcagggaatgagcaatattataaaggggtattagcatcaatgagacgacttctcgttttttgcgaagaaggacaggatgcatgttttgttttgttgaatagccagccatttcgaaaaacagcagctgaaaaaattttatataagatttaccatcaagtaattgcagagtttttttcaccgaagagtgatcattggtatgaaaatagtcggtctgcatatacagggaaaaattctatcgtttttcaacaaacaccacctgcatctttggagcaagtgatgaagagtttagaaggtaaatttcaattgatgcgtgaagaactagaatattatgagacggattatcagacaaagatgttacacaaatattgattgaggaaaagaagctaaggtgacttagcttcttttccttttgtacagttatataagggattttcattgaatatagttaagtggatagcattagggaggtgcaacatgaatcagcaaggtgtatttacagattactttcatgaagtagaaaattggtgtgaaagtgttcttcacgtattagatagccgcgcaatggaagtgtatgatgtccatatgcttgcttataaaattcagacgttattagagcgtatgaaagagcatgagtatgaaacagatgcagagtttatgtatgaaataagcgatgatgtagaacacattcagcatcacttgcaggaagtatttatgcaagaagaagaggaatatgaattatatgaaagaggggatagtgaacgagctgtcccaattggaggacatacactcccgccattaccttatccgtataatgcattagaaccgtatatttctaaagaaattatgatgttacatcatgataaacatcatcggagttacgtggaagggttaaataaagcagagaagatgatggaagaagcgagaaaaacaaataaatttgatttaattaagcattgggaaagggaagcggcttttcatgggtcaggtcattacttacacacgatattttggaataacatgaaaaaagacggtggtggaagtccaagaggagctttttcacaacaaattgaacaagattttgggagctttttacgtttccaaaaacattttacagaagcggcctctaaagtagaaggttcaggctgggcaattctcgtttgggtaccccggtctggaaggttagaaattttgcaaagtacacttcatcaattatttacacaatgggatacgataccgctccttgtactagatgtctgggaacatgcgtattatttacaataccaaaatcgaaaagatgaatatattaaaaactggtggaatgttgtaaattggcctgatgtagaaaaaaggtttgaaactgcgaaacaaattgaatggacaccatattagacgcaaattctctgcgtcttttttaatggaagtagaaggaagatttcgttcatattttaaaaggccaagcatacacttgtacaaaaagtgccaaaaggacgtggggggaaatatgagacgaatttgtgtaatcattacgcttcttatgatgtatgcaagcgttatgccgattcctacatatgcaaagatgaacagcaatgtcagtgctcgaaatgctgtattaatggagcaacagtctggtcgtgtattatacggaaaagcagaacatgagcctcaaaaaattgctagtataacaaaaattatgaccgctttattagctgctgaatcagggaagatgaaagaaatggtatcagttagtaatgaagcggtgagggtggaaggatcggcaatctatttaaagcctggacaaaaagtgaagttagaagatttagtatacggactcatgcttagatctggtaatgacgcagcgcaagtaattgctgaaagtgtgggtgggagtatagatggattcgtatatttaatgaatcaaaaagcgaaagaaattggaatgaaagatacgcacttctcaaaccctcatggcttagatggagatggatcacattattcgtctgcttacgatatggcattattaacgaaatatgcaatgggaaacgagacatttaagaaaatctttggaaccaaaacatataaatcagattcttgggattacccgtggaaaaataaacataagctggtaacgtcttattatgaatttgcaacaggaggaaaaacaggctttacgaagaaagctgggcgaacgcttgtgacaacggcatcaaaagatggactagatttaattgtcgtaactttgagtgcctctagtgattgggatgatcatatgaatttgtttgataaaggttttgaacgtttcaaacaaacgaaagttttaggacaaggagcaattgctgaaataaatgaaaagaagtatgccaaccatgtttatacgaaaaatagtttttcggtaccgttaactgaagaagaaaaaaagaacgtagtattaaaagttgaactccataaaagtataaaacttacggatggagtaaaggttgggaagacagacatttatgttggtaatgaaaaagttggagaacggaatttattttatagtaaacggaagttagtagctacaacgggactttactggaataatgtgaaagaaattttttcttacatgataggtgttgggaacgatggttaatctcgtatgggtagcgatggctgtcattgggattgtatacgccatgataaatggcacgatggaagaagtgaataaagctgtatttgacggagcaaaagatgcggtaacgatttgtataggacttattagtgttttagtattttggctcggtttaatgaaaattgcagaggaagccggattgttaaaaaaattagttacactttttatgccgatagtaaaaaggttgtttccagaaataccaaaggatcatccgtccatgggatttattctatcaaatatgatggcaaacttttttggtctaggtaatgcagcaacccctcttggtattaaagcgatggaacaactgaaagagttaaatggaggacaggattcggcgagccgttctatggtgacgtttctagcattaaatacatcagccattacattaattcctacgacagtcatttccattcgaatgacgtatgaatcagcgaatcctactgaaattgttggggtaacatttattgcacaagtactttctatgattggagcaatttggattgaccgctatttttaccgaagaaggagtagaaaggggcggaaaaaatgagtattgtaaatacaatttccttatgggtaattccttgtgtaattggttttatccttttatatggcacaataaagaaagtaccgacgtatgaatcgttcgttgagggaggaaaagaagggattcaaattgcaatttccatcttaccgtttatggttggaatgcttgtgtctatttctatattccggtcttcaggtgcgttagatgcaatgatatcggtaatgaagccaatgttagatttgatccatgttccagcagaaattgttccactagcacttatacgccctatttcaggctctgctggtttaagtattacgaccgatttaattgccacatatgggccagattcgtttattgggagattggcttctacgatgcaggggagcacagatacgactttctatattttaactgtatattttggagcggtcgggattagaaaaatgggtgatgcactaaaagtaggactttttgcagatttaatcgggattatatgctcaattgtgttcgtttctttattgtttcagtaatactattcattttttacgctatttcgcttataatacgtatacgaccactattaaggtgtagcttaatagtggtttttttatgtggtatttttgacaaaatgatgaacttttattgtgagaaatatgaaaaatatggacaataataaagggtaaaaacatgatttgacctttatatgtttattatcatcgctatgttgtttaagtaagatgaagcgaatagccgtaaagcgtatgcggttgccaagtctttctaatgtaaggtaagataaattcgaggtgaaaaaaagaaatggaacgattacaaaaagtgattgcgcaagcaggtattgcatcgagaagaaaggctgaggaattaattcagcaaggaaaagtgaaagttaatgggaaaatagtgaaagagttagggacaaaagtaactcctcaagataaagtagaagtaaataacatccctcttgaaaaagaagaacctgtttattttttactatataaaccaactggcgtaatttcaagtgtatcagacgataaaggaagaagtgttgtaacggactttttcccggaaattacacaacgtttattcccaatcggacgcttagattatgatacgtctggcgtattattaatgacaaacgatggggacttcgcaaacgtattaatgcatcctagatataaagttgaaaaaacatatgttgcaaaaataaaagggccattaacaggtgagaaaattcgcatgttagaacgcggtgttacgttagaagacggtaaaacagcaccagcacgtgtgaaaattatttcttgggacaagcgtaaagagatggctattgtacaattaacaattcatgaaggacgtaatcgtcaagtacgtcgtatgtttgaagcgttagactgtaaagtagtgaaattaaaacgtgaacgttatgctttcttagaagtaggaagcctgcgacctggtgatgcgagagaattgacaccacatgaggtgaaacaattacgcgcgcttgcttctacaaagccaagataagctatagagttaaaaattcaccagtggagtgctctgctggtgatttattcaatacaacatttacagaagataatacataacatttatcgaggagaggagaagtaatatgaagaaaaatcgcttattatttcgcgttattattctactcattttatgtggtgctgtaggatttaccctttatcaaggattctttgctaataaagagaaaatgcaaatcggaaaagaagcacctaactttgttgtgacggatttagaagggaagaaaattgaactaaaagatttaaagggaaaaggtgtatttttaaacttttggggcacgtggtgtaaaccttgtgaaaaagaaatgccttatatgaatgaattatatccaaagtataaagaaaaaggtgttgaaatcatagcgttagatgcagatgaaacggatattgcagtaaagaactttgtgaaccagtatggtttgaaattcccagttgccattgataaaggacaaaagattataggaacatatggagtaggtccattaccgacaagctttttgattgataaagatggaaaagtagtggagcaaattataggtgaacaaacgaaagaacagttagaagggtatttaaagaaaattactccgtaataaagaaagcctttacataaggggtgcgtgtctatagtgcctctggtttaaaaattctgagtattgcggtaacttgaggttagaatatacaatagtacatatagatacaggggcggtgagagtgttgaaagaaattaaatgtgaatgtggacatgttaatccgataggaaccgttttttgtgaagcttgcgggaaaccatttgaaagcaatgaaaatacaaaactattggatatgcgctatgaggggagtgcacggagatctctcacgcagacaaaaacgataatcgataaaatttggagctttttctcttctgtaaaagtgggtgtatggctaatcgtaataactttagctgcatcagcgataggaactatttttccgcaagaaatgtacataactccagggattgcaccagctgaatattataaacaagaatacggatttttaggacaattatactatcaattagggtttaataatttatacggttcatggtggtatatgattttgattgcttctatcggtatttcacttgtgatatgtagtttagaccgtgttattccactttataaagctttaaaaaagcaaggcgtaaaaagacatcctagctttttaaagagacagagattatatgggactggtacaccgcaagaaggtgacctggaaagagtgcaaaagaatttaaagaaaagaaactataacgtgaaagtggaagacggaaacgttttagcagaaaagggacgcttctcgcgttggggtccatatgtaaatcatatcggtcttattatctttttattcggtgcgatgcttcgttttttaccgagtatgtacgtagacgaagcactttggttacgtgacggtgaaacgaaagagataccagggacggatggacaatactacttaaaaaacgagaaatttataaaagaagtttatgataaaagtaaggacaaggaagtttttgatgaagcgattaatcgtgtaggcgataaaatgattgcgaaaaacttccaaacgaatgccgtattatataaagcagtaggagaaaatatagcaggacaaaaaccgaaattagaaaaagtaaaagaagcggaaattcgagtgaatgaaccactgaaatttgatcaatttgcagtgtatcaagtggattataaagaaagtgaatttaaaagtatgtcctttaacttacaaaataaagaaaataatcaaaagtggggaccgattaaagtagatttaacgaatcctaaggaaaaatatgatttaggaactggttattctctagaactattaagctattttcctgatttttattttgatgagaatggaaaaccaaatacgaaaacgaaattaccaaacaatcctgcatttgtatttaaaatgtttacacctgaaacaccagatggcgaagtgagttttgttggtattcagcaaaatatagaaccagatggaaacaacaaatataaaatgtcgtttgcaggtgttgaaatgcaaaatgcaacagcacttactgtaagaaaagatttaacgctttggattctcggcattggaggatttatatttatggttggtgtcattcaaggtatgtattggaatcatcgccgtatttggatacaacgtgttaatgatgaatggtggattgcagggcatacaaataaaaattggttcggtttaaagaaagatattgaaagagtaatagaaggtacaacaattccacagccaaatgataaagtaattgataaaaaaattagttaaggtggggaaacgatatggtgcaaataagtagtaactttctctttaccgcatttattttatatttaattgcgactctattttttggaggagccattaaagaaaagggtcataaatgggcaaatgtaggaataacgattacaattttagggtttatagcacaaacagtatattttgttacaaggtggattgcatcagggcatgcgccagttagtaacttttttgaattcggtacatttttcggcatgatgcttgtaggagcatttattgtcatgtattttatgtaccgtgtaagcataatcggactatttgcattaccagttgcgcttttattaattgcctatgcaagtatgtttccgagggaaatatctccgcttattccatctttaaaaagtaattggttacatattcacgtgacgacggcagcagcaggacaagccattttagcgattagttttattacaggcgttatgtatttattgaaaaatgtagatcaatcgacgagaagtaaacgtacattttggctagagacggtagtatttacacttgtttgtacagttggatttattggagtaacaacggtattttctagtatgaaatatgaagcgaagtttcaatggattgataaaaatgaacaacaactggaaatgaagtacaatcttccggctttagttggaccgcatgaagggaagttactgacagaaaataaattagaaccggcagttgaagttccagcaattgtaaatgcaaaaaaattaaatactgttatttggtcagtgttagttggaacattactgtatattgtattaagactcgttttacggaagcgagtatcggcggcacttcagccgttagtaaagaatacgaatagtgatttactagatgaaatcggatatcgatctattgcaattggattcccagttttcacattaggtgcattaatttttgcgatgatttgggctcaaatagcgtggacgcgcttttggggctgggatccgaaagaggtttgggcacttataacgtggctcttttatgctgcagtactacatttacgattatctaaagggtggcatggagagaaatcagcttggcttgcagtaattggttttgcaatcattatgtttaactttattgtagtaaacttaattattgccggtttacattcatatgcatagagaaataaaataggagagtgcatgtcactttcctattttatttttgtcaacttttcttcttttttgagaaaaacatgacaaagtagcggttgattttgtaaaatgatgtcgaggacattatatacagttcaaaaaaaatacatagttttggaaaaaaattgaacaaaatttattattcttgtgaagcataatatgggaagtgaaacatttagaagattgcttaaataaacgagaatagcgcaacataatagttaaagaagggtaggtgtgaaccgctgaggtgagagtacgcagcgggtagagatggaaaatgaatcaagaattttaattgtagatgatgaggatcgtattcgtcgtttattgaaaatgtacttagaaagagaacaatatacgattgaagaagcagataatggtgatacagctttagaaatggcgttgcaaaatgattacgatttaatcttattagatcttatgatgcctggtaaagatggcattgaagtatgtaaaggggttcgtgagaagaaagcgacaccaattattatgctgacagcaaaaggtgaagaagtaaatagagtacaaggatttgaagttggaacagatgattatattgtaaagccgtttagtccacgtgaggtcgtgctacgtgtgaaagcggtattacgtcgtgctgtaccaacaacattctttacacaagatacaacgacaaaagatgttactgtattccctcacttaacaattgataacgatgcacaccgtgttactgcagatggcaatgaagtaaacttaacgccgaaagaatatgagttactattatttttagcgaaagctcctgataaagtattcgatcgtgagcagctgttaaaagaagtatggcaatatgaattcttcggagatttacgtacagttgatacacatgtaaagcgtttacgtgagaagttaagcaaaaaatcaccagatgcagcgaaaatgattgttactgtttggggtgtaggttacaaatttgaggttgtgaacgactgatgctttggagaagtgtagtagggaagttatggatgaccatattacttctcgtttcgtttgttcttggatttgttgcgattttactttcacaattttttagaacgtattatgttgatatgagtgaaaatagacttcaaaaagtcgcaacaagtgttacggaattaattgaagaaggtgccgatgtaaaaacgattgagaacatcgcgtacaaattctctgatccactttcaaggattattattgtagaagatggcaaggaaatctcttcttcaccgaaacaagaagggttagtcacccttacaatggataatttaaaagaagataaagaattagccgctgtttttacggacaaaaaagaaattaagaacaacattagaaaagcttctgatagtagaaagaataaaagcactgaaaatgatattgtgatcgttgggaaaccagtgcaatcaaaaaatcaaagcgcagtgttcgtatatgaatctttacaagtgccaataaaagatatggagagaacgactgatttcattttcttagccgctgggattgcgattatattaacaactttctttgcgttcttcttatctactcggattacagcaccgcttcgtaaaatgcgtgaggttgcttttgaagtgtcacgtgggaaatttgatgcgaaggctcctatggtatctcaggacgaaattggtgagctggcaacggccttaaatcaaatgggtaaacagttgaagtttaatatgaatgctttgcagcaagaaaaagaacagttagctagtattttgagtagtatggcagatggagttattacgttaaatcaagaaggtgaagtcgtagttattaatccaccggctgaacatttcttacaagtttggcaagaagaaaaagagatagagttaagtaaaaaattaccttctgaacttgtggaactattccatctcgttgtagaaagcgagcaacaacaagttgttgaaattaatttacaaaaagggaactatgtagttcttatgacaccactttacaatcaaacgaaaattcgtggggctgtagcggtactgcgagatatgacggaagaacgtcgtcttgagaaaatgcgtcaagactttattgcgaatgtatcacatgaacttcgtacaccgatggtcatgctgcaagggtatagtgaagcgattttagatgatattgtgcaaacgaaagaggaaatagatgagtttgttcaaatcatttatgatgaatccgttcgtttaggtaaacttgtaaatgaattgttagatttagctcgtatggaaagcggtcacgtagagttacatattggtgaagtggacatacatccgtttgtggaaaaaattggtcgtaaattccaagggattgcaaaggataaagaagttgaactaacagttgatttccggaatcagattgaagaatatgcgtttgatgcagatcggatggaacaagtgttgacgaacttgattgataacgcaattcgtcatacgaatgcgggtggacatgtaacgcttgtaattgatacgaaaaataatggcctcatttttgaagtacaagattcgggtgtaggcattccagaagaggatattccatttttatttgatcgtttctataaagctgataaagcaagaacacgtgggaaaaagggtggcacaggactcgggcttgcaattgcgaaaaatattgttcaaggccatgacggtaaaatttctgtatcaagtgttgttggagaaggaactacattctctgtatatttaccgaatcgtataatttagatatgcttttttaaagttgataatgaataaagttctgctgttttttatttttttgtaaactcaattaaataaagaatggtagaacttttttctatcttggtcgaatcaagaataacaagagagggtgctgtgaagaaatgaaattatatacaaaaacaggagataaaggaacgacaagtgtaataggtggcagggttgataaagatgatatccgtgtggaagcgtatggaacaatagacgaggcaaattctcatattggatatgcaatgactaaggttcaaggcggggcttttagagatatttacaatgagctcgaaaatattcaacatgaactatttgattgcggaggagacttggcaatagtggaacaaaaaattccttataaagtgacaattgagatggttgaaagtttagaaagaaagattgatttatatatagaagaagccccgccattagaacgctttattttgccaggtggtagcgaggcggcggctattattcatattgcacgtactgttgtaaggagagcagaacgctctatagtatcattgcaaaaagaagtgaaaataaatgaagttgtcttaaagtatgtaaatagattatctgattatttgtttgcgatagctcgagtaataaatgcccgattacaagtgaaagatgtggagtataaccgtagtgcattagtttttcgtgataagaaagagaaggaagtggagtaattcactttctttttttgtatacttttttctgtaatataccaaaatagagaaggtatggtggtaattagaaaacggaggatgtatatgaaagttttaaaatgcggcgtcatgttattgagtatgctgtttgtatctcaattacatgtttatgcagaagaaaatcgatggacatggcctgttgaaggtcagataagtgattattttgggacaaggcatggaaaacactatggtattgatgtagctgcgccgattggaacgcctgtggcagctattcaagatggtagggtaacgaagtcttattattcaagtagttatggaaatgttgtatttattaaacacggagaatatgaggctgtatatgcacatttaaataagagatatgtggggcaaggagattatatttccaaaggagaaaaaattggagaagtagggaacacgggagaatcgcgaggtgcacacttacatctagaacttcatcaaggaagatggacgatggcgaaaaagaatgcgatgaacccattgcttgttttaaatgaacaaagaaatgaagttgtttcttcatcattatatgtcgtacaaaaaggggatactttagttagtattgcacggaaatttagtatgacacttaaggaaattaaagaaaaaaatggattgcagcaagagctaatttatcctaatcaacaattatatgttaagtgaaggaaacatttcaaaaattaaactttgaacaaatttatgttcttcttaaataaggttcaatgtaaatgaaattatatgggcgcttttgctagaactattgagtgaattagagcatctatatctaaaagaaaaccgtcccaaaatttattttgggacggcttcttttaccaaaaaataaagacacatataaatccagaaatagctaaatagctatataagtaaaaaacttttgttcttgttttctcttttgttcgaaacagtacgatagttggttcaattaaaccgattgtcaaacaaagtaggccaagaagcatacaaccaatcgaaatagaatacagggcgatttgtggtgcttgaaatggaatcatccattttaataaaaatgcaataagtgcagtgtaacaaatactaccgatgtatttattcagtggtgtattagaacgaaaaccaggaagtttttttaagaaagagcgggaaacaacttctgtttgtaaagatgtatgctcttcaataattttttgagcttcttttcctttttgaaaaagagataagatccaatttcgctcaccctgaaaaataaattgagaagttgtcaaatagtgatcaatcttcactttattccaactcttccacggatgacgctcacacatttttaatttactttctgtttttttatcatactgataaatactaatgccatcttcatcgaaagtagcatagtatgtctcgtttgagaatgtgcctaaatcaattgggcagtagaaaagtaattctttttttaagtaaaagtattcttttcttaagttttttttcattgcttctcgaatagaatgtctcttgtcttttttcatgacatttcctccataactcagaaaatgttcttatcttaacaattcaatatcttatcacttttaattatatatgactaggtaattcaaaagagaaatgccgaataataaaaaatatggattgtattgtaaaatatctcgcaatttatttgtcgttacgaaaaataaataactaattttaaataagttacaattttttagttcacaatgttatgaggttgttgtataatgaaggggaaaatagaatatcggtctatcttcggggcagggtgaaaatcccgaccggcggtgatgaactatttatgattttgttctaagcccgcgagccgttaaggcaggatttggtgtgattccaaagccgacagtatagtctggatgggagaagatggaggttcaagcgttcaaaaaagatatggatttgaacgtctgtttgatgtgccttaaattctccctttgtgtaaaacacaaagggttttttcgttctatgaaaaaataggcatagcagaacctttccactttccatgagatgatcgatggaaaaggagagagaaagatgaaacaaaaaaacagtgtagtgcagatggtgagtgtagcgatgctaagtagtattgcatatttactaatgatgttagatttcccgttcccagggcttccgccatttttgaaaattgattttagtgatgtaccagctctaattgcagcaattatctttggaccagtagcaggagtgattgtagaggcgataaagaacattttacattacgggattcaaggaagtttaacgggagtaccagttggagaaattgcaaactttattgcaggatgtttatttattggaccagcagctttcttatttagaaagtatcgtactgtgaagagtttaactacaggattaatgctagggacaattacaatggcacttattatgagtgtattaaactacatcatcatattcccggcttacacttggtttttaaattcaccggctatgtctagcgaagctataagaacaacggttgtaacggcaatcttaccatttaatttaattaaagggattgttgtaacaattgtatttgtagcattattctcacgcctgaaagtatgggtgtttgcaaaaatgaaaaatgcataatatatatatatataaaccattagtagtgtgaaactactaatggttttttattaaggaaaataaaatttagatacaaaaaatgcccctcatcaatatgaggggcattttttgaagttaataaaagactattcgaattttaaagcgtctccgtcaaatgattcgtcagcaactttaattgagtcagttggacagccttcgaatgcatccatcatatcttcaattaatacatctggaatttcaacgataccttggttatcatctaatgttacaaatgcaataccttcatcatcatagtcataaatgtctggtgcagcagcgccacaagcaccacatgcaatacaagtatctttatcaacgattgtatattttgccatcttttttccctcctgataatatgtatgtgaaaagctcgccataaaaattataaccttattgtaaaacggtttgtaaaacttttcaacataaaattataatgataatgcttatcaattagagtgtcaacttatttttgaattatgtcataagattttcaaaatacgtaaatatgatttcgtttgatacaatagaatatatacaagtatatagttcttatatgataagtttaatgagcgaaagtagatagtgtaattgtactgaaaagaatgaagttaagattggaaggtggaagcggtcatgcaaatacaatatactttgttgcattgtttaaaacaattgaatggtgaaagaaccgtttcttctatttattatttactaaagggcaaacgttcttcgcaaactttacaagatggaaatatgttccgaatttcttttttgttcggaatatataaatcattgaatagaaatgactatgatggtgaagttgcaaagttgttgcaagcgaattttattcaagaaatacatgaaaatacatatgtgttaacacctacgggtaaaatgcagttacataaatggggggaagtttatgcttttccggcgcatttgcatggtttacattatggtgaattaggtgaaacattttggaaaagattatcattaattattcaaaccatatcaaatttacaacagaataatacgaagtttatcccaattcagcaagatacagaaataatgatgtgggtgaaacgttttctaacaggaataccatataagagaagtgagttggcgagaaaactatggacggaagtacataatcttttagaaaagagcaatacgatagaagcgacgattgtaacatatcgactaacgggttatgaacgtattggttgtacattgcaacaattagcagaaattacgaaacaagatatattcagggtgtattttttattttggggtacaatgcatttctttatacaagaagttcgtgataaagaaaatgaatttccactattagctgaaattatatcttatccaaatgagagagctgaattatttagtttatccacgaaaaaaacatataatttttggagacaaggacgttctttagaagaaatagcgacgattcggaatttaaaggttgcaacgatagaagatcattttgttgaaattgctttgcgagaaaaagatttttctattgaaatgtttatggaaaaagaaaagatagacaaagtaataaaagtaattgaagcattgcaaacgcggaagttacgtgttttgaaacaagcggttggagaagatatctcttattttgaagttcgtcttgtattagcgcggatggagggtgtaaatgaaacttgaagaatatttatataagtggtttggatattctgaatttcgtccaggtcaaaaaggagttattacagatttattagaaggaaaagatgtgatagcaatgcttccgactggaagagggaaatctatgtgctatcagtttccggggcttatgcgagaaggaacagtgcttgttgtatcaccgttattatctttaatggaagatcaagtgacacaattaaagtatgttgtgaaaaaccgagtaatagcatttaatagttttcggacattaaatgaaaaaagagaagcgatgaaaaaattatcttcatataaatttatttttgtttcaccagagatgttacagtcggagttattaattaaggaattgaagaaaattcatatttcattatttgttgttgatgaggctcattgtatttctcaatggggttatgattttagaccggactataaaaaactaaatgtagttattgaaaatattggttctcctacagtattagcattgacagccacagcgacaaaaggggtactgcaggatatcgcaaatagtttaaatttaaagggtgccgcagaacatgtatactctattgaccgtcctaatattgcaatggatgtgcaatttgtagagacgatagaagaaaagaaagaggcgcttttagagcaggtgatgtatttacaagggccggggattgtatattgctcaagtagagcgtggacagaaaggttaacggaatacttgagaggaaaaggtgttactggtgtagctttttatcatggtggtatggaacatgaagagcgtatgttaattcaacagcagtttatgaacgatcaactgcaacttgtaatatgcacaagtgcatttggtatgggggtaaataaggcgaatacgcgatatattattcattttcattatccaactaatatagcttcttacttacaagaaatcggaagagctggaagagatggcgaaccgagtatagctattttattatgtagtccgttggatcatgatttaccaatttcaatcattgaggatgaattgccaagtaagtcacaaatacaatttttattttctttactacaagaaagaatgtttcaaacgaaagaattaccaatagaagatgtagaagaaatttgttataatgcagcaagatttaatgagcaatattggcgtttcgttcgttatcatctcgaacaggttggaattatacaacaacgaagattattattagaaggtttgtcagatgaaattatgaaccgattaatagctgaagtagaaataaggttgcgtaataaatatagtgagctagaaaatatgaagtcatggatacaagttaaaggatgtagacgtgaatatgtgctgcaacagttcggttataggaaagagcaagagttaattaattgctgcgattattgcggtattacaaaagaagattataaaaaaagacgagcgcaacaatcggatttcgactataattgggaaacagagttacaaaagcttttcggcctagaaaagatggaggaatgatgaacattcaaaggcataatgttgaagatatgagtccgcaggaaataaggctgaatctatatataacacagttaattattatcggtattggctgtttactggcatatatattatttcaagatgtaaaagaagtctttaatttatggaaatgggaaccagtatctatacttattataggtggtttgttagcgattggtattgtgttattagattatgttgcaatgcgagtgtttccggagtcttggtttgatgatggtggtattaacgataagatgtttcgaggaatgtccgttctgcatttactcgttattacgttcttaattggttttgcagaagaatttttatttagaggtgtagtacagactcattttggaattgtaattgcgagcttcgtatttgcagtgttacatattcgttatataacaaagccatttttgttttgtttcgtctgtttcattagttttgtctttggttatgtatttgaatggacaggaaatttgtttataacaatctttgcacactttcttgttgattttataatgggactccaattaagaaaataaatggaaggtggtggtgaacaacatgaggaaacgaattcctgattttgaagaggaattagaagttgagcgagtggaagaaaaagaaagtttaccgccgcgtagtgaaattcatagaaataaagaaaaaaaacaaaagtttaaaataaatcacattttcgtccgggttttaacatttctattcattctgctgccaattagtattttgtggtacacggataaatatattcaggtgaagggtgatagtaataatgccggaaaaagtgcgtttgaagtaatcttctttgattcagctaaatctgagtcgcagaaacattctgaaaaagtaataacgcatactgtgaaagagggagaaactttagaaagtatagcgaagcaatatttttcagatggaaatggaattgaagtaattaaaaagtataataacttgcaagaagatgaagtgagtgcaggtcaagaattaaaaattccgataaaagataagtccgcaaagcaagaaagctagtgagttaagcgatcacagtttgttataaaagcctaggattatctttatgaggaggggagtcaaaaatatgatatggattatattattcagtactctcataggcatggggattttattgcttcttgtgatgtataaagaagcgatgcgtaatacggtgttggaacatactttagtatttaaagaatttccgaaaagttttcaaaaagtaaatgtgttttttatttctgatattcatagaagagtcatttcgaatttgttaattgaacaagtaaaaggaaaagtagatctcgtaattatcggaggagatttagcagagaaaggtgtctctttatcaaaaatctctgcgaatattcaaaagttaagagagatagctcctgtatattttgtgtggggaaacaatgattatgagatagaatatcatgaattagatgcgttattattagaaaataacgtaaaagttttagataatacaagagtggtatttgagtctgaattaggagagaaaatttgtttgctcggtatagatgatgttggattgcaccgtgatcgtctagatttggcattggcggattgtaaagaagatggttttcgtatcctagttagtcacaaccctgatataataaaaaaaatgtctggaaatgaacagatttcacttgtgttaagtggacatacgcatggagggcaaatccgattattcccatctaaaaaatatttaaaaggtggcgtatataaccatttaaatacgattctctttgttagtaatgggtatggaacaacattgataccacttcgtttccgagcacctgctcaaacacacatcattacattgtgcggagggaaatgatgccaactcttagtgggaaatataatataaaagccgtttcgaatataattggagttcagccgagtacgcttcgtgcatgggaaagacgatatcaaattattgccccaaagcgtaatcaagctgggcatcgtttatatacagaagagcatattcaaattttaaaatggttaatggaaaaagtttcttccggtatgatgattggacaagcagttcgattattagaagagaatcgtttgcagagtacagttcaaaaagagatacatttcgataaagaagttgttttagtggacgatttgctacaagctttgttaaaatttgatgaaattacaattgctgcattattaaacgaagcttttagtatatattcaacagagaaggttgttgccagtattgttcttcgagtgacagacaaattattaacgtcaaaaaataataatgagatttcaatggtgcaatttcaatatgcactatcatttttacaaatgcgtctagggatggtgtatcacaatgcctcaatgttttcctctttacacaaagttattgtgttagaaaaggatgcattgaaaggatttattttttcaacttatttacgcttaaaaggatatgaggcgatatatattaggacaagcttagctgaagatggtatgttatcagcggtagaggaaatacagccgaaatatgtatttgtatcttttgctgacgaacaagaaatgaaaaagacgatgaactttataaatttattacaagaaaaaagggaatctcttttagttggatttatcggaaagctaggcgttctaaaccagttggacattgaaacaatcttaattggtgatacgaaagaagaatgggatggatggttaaaaatgtcggaatagttgttcgaaaagaaccatctattttctatttcatataataaaaattagatgcattggttacgtagggagggtatgagatgaggctggaacgattaaattacaataagataaaaatttttctaacatttgatgatttatctgaacgaggattaacgaaagaagatttatggagaaatgcaccgaaagtacagcaattatttcgtgatatgatgcaagaagcaaataaggaattagggtttgaagcagatggtccgattgcagttgaagtgttttctctacaagcacaagggatggttgtaattgtaacgaaagaaaatcaagaaatggatacagatgatgagttccgtgacgagtttattgaaatgcaagtgactctagatgaaagtgagcatatattatatgagtttgctacgctagatgacgtaattaacctgtcgaatcgcttatataaccttggtgtaactggcggaaagctatatacgtgggatgagcgcttctatctttgggtggaagaagaggaacaaattcaattgttaaaggcggattttatagctattttagcggaatacggtaatccgtctacagcaaccatttatcgcatcatggagtacggtaaagaattaatggatgttaacgcgatagagcaaatacacaattacttcgtgaaaaaacaaaacctcagctaatacaacatagctgaggttttgtttttatttggagaagggaagggatgattgtaaatactcgaacatactttttgaaaataaaatatgcagttttatgggagtgtggttgatgaaaataaaaaatatttaaatatttaagtattttacttttctaaaagtaataaaaggactataataatagtgaaaacgcttgcaacagaaaatagtttgtatatatttgttagcgttttctattgcattccaaatttaagggtgtatactaggcaatgaaggtttactaaacaagtgaaattacagggggtttacttactatggtagccgaaaagggaactcaaacaaaaacacaacaacaaagggaacaacattttgaactattgaattcaacacaaattgttattagtgaagcgttagaaaaattgggttatccaaacgaagtatatgaattattaaaagaaccaattcgtatgatgacagtgaaaataccagttcgtatggatgacgggactgttaaaatatttacaggatatcgtgcacaacataatgatgctgttggtccaacgaaaggtgggattcgcttccatccgaatgtaacagaaaatgaagtgaaagcactttcaatctggatgagtttaaaatgtggtattgttgatttaccatatggtggaggtaagggtggaattatttgtgatccacgtgaaatgtcattccgtgagttagaaagattaagtcgcggttatgtacgagcaattagtcaaatcgtaggaccgacgaaagatattccagctccagatgtattcacaaactctcaaattatggcatggatgatggatgagtatagccgtattgatgaatttaattcaccaggatttattacaggtaaaccgcttgtattaggtggatcacatggacgtgaaacagcaacagcgaaaggtgtaacaatttgtattcgcgaagctgcgaaaaaacgtggcattgatattaagggtgcacgcgttgttgttcaaggattcggtaatgctggtagcttcttagctaaatttatgcatgatgcaggtgcgaaagttattgcaatctcagatgcttacggcgcgttacatgatccaaatggattagatattgattatttattagaccgtcgtgatagcttcggtacagtaacaaagctatttaacaatacaatttcaaacaaagaattgttagaacttgattgcgatattttagttccagctgcaattgagaaccaaattacagaagaaaatgctaatgatattaaagcgaaaatcgttgttgaagcagcaaatggtccaacaacattagaagcgactaaaattttaacagatcgcggaattttacttgttccagacgtgttagcaagtgctggtggtgtaacagtatcttactttgagtgggtacaaaataaccaaggttactactggactgaagaagaagtagaacaacgtttagaaaaagtaatggtaagatcatttgattctatttatgaaacagcacaagttcgtaaagtgaacatgcgcttagcggcgtacatggttggtgttcgtaaaatggctgaagcaagccgcttcagaggttgggtataaaatattatatcttgagaaaacgtgatttcctttcgagggaatcacgtttttttgttgaagtattaaatgaggtgttgtatatggagaatgaaatgctggaacgagtagaacaattagaagaaaaggttaataggttagagggagaactcgcaagaacgatgaaagctcgcaaaataagtaccgttcggatgttcggggaagggctactgtttctgatatttggtgtggttgtagtagggccgattattgccgttgtaatctcaatttttacttggcttgctgaaaaataaaataaaataaaaataaaaaagaacgcttgttctatgcgaacaaacgtgctatactctccttagataaacaaaacggaaatgattttaaggagagataaatgatgaaaatgacagtagaccaaagatttatgatgccagcagatgttgtagagcgagtggaagtattacgaaacaaacaaagcaagcgtggcacattattacaatcggtaaataaatttttcggtttagatacgaaagaagattgtgtttggttttacggtttttatggagtggctgtaagtatcttgttgtttatggtgttcacttcaaatattttcgattttctcttcgcgtaagaaatatgcgataaggacattgctaccgaatacatatataaggaagtaaggtaatcttctagagcgggagttggtagcaatggcgatgtttcctatagagcgcaattatattggatatggaagttcacgaccggggattcctctgactaaagtgagatttatcgtaagccatgatacggggaatcctggaagcaatgcgataggcaatcgagattactttaatgaattacaaccgaaagcttcggcacatacatttatagatgataaaacaatattggagattattcctataaatgaagttgcgtatcatgttcgatatggtgtgccgacggataatgacttatatggctatgacgcgaataaggcggccattggagtggaactttgttatggtggtgatgttaacttttgggaagcgtataatcgttttacatggtatcatgcgtatttatgccaaaactttggcttaaatccgaaaaaagatatcgtgtcacataaaacgcttgatccagctagaaagattgatcctgagaatgtattagggaaacaaggtattaaatttcagcagtttttagcagatgtctatcggatgtacgtttcgtttagatgacaaatatatgaaaaatgaatacaataaagataggtgcctactgctgtaagtaggttttttcttgtttttataaatagtgcattggtagaagactaggagtggacgagtatgcagaaagaaacagttattataatcggaggcggtccgtgcggattagcggctgcaatttcgttgcaaaaggtagggataaatccgttagtaattgaaaaaggaaacattgtaaatgccatttataattatccaactcatcaaacatttttctcttctagtgaaaaattagaaattggtgatgtagcttttattacagaaaatcgtaagccatttcgaaatcaagcgcttgcgtattatcgtgaagtagtaaaacgtaaatctgtacgtgtaaatgcttttgagcgagtggagaaagttcaaaaagatggagaagtttttcaggttgagacgacaaagcgtgatggaagtaaggaaatgtatatagggaaatatattgttgtagcaactggatattatgataatccaaattatatgaatgttccaggtgaggaattgaaaaaagtagctcactattttaaagaggggcatccttattttgatcgagatgtagtagttataggtgggaaaaactcgagtgtagatgccgcgttagaacttgttaaatctggtgcacgtgtaacggtactgtatcgtggaagtgagtattcaccaagcataaagccttggattttgccggaatttgaggcgttagtacgaaacggtacaattcaaatgcattttggagctcatgtgaaagagattactgagcatacattaacgtttacagttgatggtgaagcttttacaatcaaaaacgattttgtatttgcgatgactggttatcatcctgatcatagcttcttaacgaagatgggtgttcagattgatgaagaaacaggacgtccaatttatacagaggatagaatggaaacgaatgctgaaaatattttcattgcaggtgtcattgctgctggaaataatgcaaatgaaatatttatcgagaacggtagatttcatggagatgcgattgcgcaaaccattgcatcaagagaaaaataaaaaggagctgtcgggaaaatctcgacagctcctttttattcgtgcataaacatattttgaatggattcatgagaatttgtattctctaatgcaacaagtaatttaatgcgtgctttttgtgcatttaagccgtatgtgaatacaatgcccatatcttttaagtgtttaccgccaccttcatacgaatatacgtcttgaacgataccgttgaaacagcgagaaactaatacgacaggaatacctttatttaataatctttctaggctaggtagtgttcttggagggagattaccttgtccaagagcttcgataacaatgccgtctacaggaagattttcgattgctgctaataatgtatcatccatgccagcatatgcttttagaacaactacatttttagacactttatttatcgtatatgattcgcgatgtactaaagcgtgatggaagacaacgccgcgttttgttaccattccaattggtccgtattgtggactttggaatgttgcgacattacttgtatgtgttttcgttacatttgtagcgcaatgaatttcgtcgtttaatacgactaaaacacctttttctgcagcttcatcacaactagcaacttttacagctgataagaagttatatagaccatcagcacctaactcattactagagcgcattgcacctgtcactacgatcggaatagttgcttgtactgttaaatctaagaaataagctgtttcttctaatgtatccgtaccatgcgtaataactacgccatgaatgttgtcttgttttactctttcatcaatgatgacttgtaattgtaacatttcgctcggtgtcatatgaggagatggtagatggaacacatcttcaacgattaaatcaacatcgccttctaaatcaggaatgaattttaaaagaggattttttttacctggttgtacgaccccagtttctttatcttcctccattgcaattgttccacctgtgtgtaaaactaggattcttttcaatgcttatacccctttcaagtaaaaaaatacatttagaacataacatgttttgagtaaattcgacaatggaaatgtataaaagtatgcctcgaaaatgacaataaaattaactgctatatgtacgatgtataaaattacgaaacgaaatgtgcaaatatagtataggagggagaaattacggtgaaaaagatggagagaatttttattcgtatattaataatacaattcatttgtctttctgttgtacaattgttatttatacataagtcatcagtgaaatatttatctaaaatcgtttattatgagggtgttatggtaaaaaacaaagtggaaatcttgcaggtgaatcggtagttttcattttcttctatgaaggattatgctacaataattgaggatttaatgacgcgaagcaaatgagaagaagcagggtgaacacctgcttttcgttttgttttataagtgaaaaaatgaggtgttacaatggataaacgaatttcaattgctatagatggtccagcagctgcagggaaaagtacagtggcaaaagttgttgcgaaggaactttcttatgtttatattgatacaggcgcaatgtaccgtacgcttacatatgcagcccttgaacaaaaagtagacattgaaaatgaagagcagttaatggaagttgtaaagaatgtaaatattgagtttcagcaaggagaaaatacacagcttgtatttttaaatggacaagatgtttctgaagtaattcgtacacctgatgtgacgaatcgagtatctattgtagcgaaacatcgccttgttcgtgaagaaatggtacgtcgtcagcaagagttagcgaaaaaaggcggcgttgtaatggacggccgtgatattggtacacatgtattaccggatgctgaagtgaaaatctttatgcttgcttctgttgaagaaagagcggaaagaaggcatttagaaaatttaaataaaggtttcgattctaatttagagcagctaaaagaagaaattgctcagcgtgataaattagattcagaacgcgaagtttctccactaaaaaaggctgatgatgcattggaattagatacgacttctttatcaattgaagaagttgtccaaaaaattatgagcattgtttctggagtgtttgcgaaataaagaaaggggataatcctctttctttttttgtttaaatagaaatgtaaaggatacgtgaattatgagtctctttccttgacaaatgagctgatttgtaagaagttagttaaagaggaataaaactgtcagaatatattcgctattatatttcaaaacatacttttttcaagctggttttgctgtatactatttatataggtttaatatattttcttgtgaatgttattgaaaaagagtatgtgatgagaaattcttaaacatgcaaatgaaaactttgttttcatttcgtatatacataaaaaatgctttgtcaattctgtagggaggtatttccatggtagagaaaatgaatgaagaagttatggattcaaaagaattacaagttggtgacgttgttacaggttctgtaacgaaggttgaagagaaacaagtgcttgtaaatgttggatacaaaacagatggcgtaattccaattagtgaattagctaacgttcatattgaaaaagcaagcgatgttgtagaattagatcaaacactagagttgaaaattattaaattagaagaagatgatcttgtcttatctaaacgtgctgttgatgcagaaaaagcatgggtagaactacaagagaaatttacttctggtcatgtatttgatgttactgtaaaagatattgtgaatggcggattagttgtggaccttggtgttcgcggttttattccagcttcacttgtagaagtacattatgtagaagactttactgactataaaggtaaaacattagcggtgaaaattgttgaattagaccgtgaaaaaaatcgtgtaatcctttcgcataaagcggtagtagaattagaactagattctaagaaaaaagaagcaatttcttcattaaaagaaggggacgttgttgaaggaacagtacaacgattaactgactttggcgcattcgttaatgttggtggagtggacggtttagttcacatttcacaaatttcacacgaacgtgtagagcaaccttctgaagtgttagagcaaggtcaaaaggttaaggtaaaggtgttatctgttgatgctgatacacaacgtatttctttatcaattaaagcagctcaaccaggaccttgggaaaacgttgctggcgaaataaaagctggagatattcgtgagggagtagtaaaacgccttgttacatttggtgcattcgttgagattttaccgggcgttgaaggacttgtacacgtatctcaaattgcaaatcgtcacgtgaaaaatccgaatgaagtattggaaatgggacaagaagtaaaagtgaaagtacttgaagttcaagtagcagagaaacgtatttctttaagtataaaagaagcgcttgaggaaaataatgtaactgaagattatagtcagtatgagccaaatgctgattctgctactttccaattaagtgatattattggtgaacaactgaaaaaattaaagaaataatgaggggtacaagtggtaagggcaaaacgtaaattagatcatattgaatacgctctttctactggtcagtctcgtacgcatggctttcatgatattgattttgtgcatcaaagcttgccaaattcaaattatgacacaataacatgtgaaacaaaaatcggcgaactttcactaagttcgccgatttttatcaatgcgatgactggtggtggaggagagaaaacgttacatattaatgagcaattagcatatgtagcgaaacatcataaccttgctatggctgtaggttcgcaaatggcggcgttaaaagatgaaagtgaagctgcttcttataaggtgatcagaaaggtaaatccaaatggtattttctttgctaatttaggtagtgaggcaactatcgaacaggcagagcgtgccgttgatatgattgaagcgaatgcattgcaaattcatttaaatgtcatacaagagttaacgatgccagaaggagaccgtgattttactggagtacttcagcgcattgagaaaattgttttaaatagtaaagttcctatcattgtaaaagaagttggatttgggatgagtaaggaaacagtgcagcagttagcgaacgtaggtgtaacagcaattgatattggtgggcaaggtggtacgaattttgctgctgttgaaaatgaaagaagacagcgaatgctttcttattttaataactggggcatacaaacagcaacctcgattattgaagcaacctctacaaataataacctctcttttattgcatctgggggcatacaaacagcgcttgacgtagcgaaagcgatcgcattaggggcgaatacaactgcgtttgctggttactttttacgtattttaatgcaagatggtatcgagaagttagtggatgaaattgagctcctacatacagatttgaaatttataatgacagctcttggtgcgaaaacgatagaagagttgcaatctgtacctcttgttgtaaagggtgaaacgtatcattggttaatgcagcgtggtattgatactgcgcattatagtaggagataaaaaatcaaccgttcggttgattttttttgttctattctttttcgtaatataaagtggagaaaggaattagtattatataaaaatatcatttcgtaaaaattgcaattgaaaaagggttgaaaaatgtagatggtgtgttgtcgaattactggagagaacttaatttttaataggaataggtgaagataaaaagaagtaatgggaggatatagtgtgtgaaatattatttcaatataaatagaaaacattaaactgattatgtaaaagacggtttcgtacaatatcgaaaccgtctttttgcattaattagtgctggttttgttttcgagcctgttctggtgtatcaagtccagttgcacctggatattgtagtgattgatcacgatcggattcaacgcggcgtgattctcgtagttttcgttcttggcgatctttacccataatgaataacacctccttgttaaaagtgttgctgttataagaaaaaactatgcgtaaataaagtggattaactttcataaaaagttcccataatggaaaacataggaggtgaagttgatggatggaagtactttttattttgtagcttggatagggtggatcattgtaaccttttttatgaaaaaggaccttattcggtggaagttaggcgcttgtatactgatttttataatttgctctccgttacatgtaacgatcgcctcattcgtggtatcagtaaatgctcttttactttgtattatttcttttatagggatcacgctatattctgtctggaaaaaattatatagcttactttcggcacttattattgcaatgttatatacaagttttcatctgttagaaatatatgatccgatttggattgtggtggatagagtgtttctgctaagtagtggtcttgtgtatgcatcggtgttattgcatggagatcgcatattacgattatgttctctatatgtagggatgttacaaggagagctgctagtgacatttatttttaggaaattgaattttccatatgattacggtagtttagcattttttgatatcgtcgccatttctacattattcatggcaatattgttttggattgcaaaagcatcagtatacatggaacggtttaagagaaaaacacgtaaaagaaaggcgagggtaatacatgactgaatatacaccagccattttatgcggcgtaatagcagggacagttacaagggtgctaatgcttcggacggatacacggcaatatccgacgaggctacatgggaaaattattcatattgcaatggggttaattgcagctgctttaggagcgattgcaatcccgtctattttgaaaaaagatttttctgccattacatttcttacattagcagcgacacaatttcgtgatgtacgtaatatggaaagaaatacgcttcaacaattagatgggtatgagctcgtaccgcgtggaaatacatacattgaaggaattgcattggtttttgaaagtcgcaactatttggcaatgttaacgtcgtttgcaacgacgtttgcgtatataggattccgttcatggattgcaggagtaattatggctataatcgcattttttattgcgaaaaaattaatgtctggtaaaaggctacatgatcttgttgaaattgagcacgttccgcttcgttttgaaggagcagggctttatattgacaatatttacattatgaatattggattgccagcaagacaagaagaaattatgaaatatggtatgggttttattttaaagccgaaatcaattgatgcgatggttacaatctcaaatttagggcaacgacaagctattttacacgatgtttcagtagcgttagggatttatagagattctggtacaccagcgcttgtaccgttagcaaagcgtgatttagaggatggcagggttgggatttttgtcctgccgcaagatcaagatgcagagaaagcgataggtgtcataggaaatgtaccaacgttagaaagtgctgtccatatgtcatcggaagccccgaaaggaaggggagataagagatgatgttagaaagtgttattctggcagttataacaacgactccagaaaaatttgcaggtggtgctcctttattcgtttgcgaatcgacagaggaactagaatttgttgcaaataatttagaggcaattttagatggtattgcacatcgcttacaagagaatgtatatattattgtgaaacattagcaacgtgtgttataatgtgaggtgttttgatacgttgagaaatattctggaatgcaaatcccttcttgcacaaagaagggttttttacataataaacagaagcaagttgaaaggatgaaagtatatgccgaaaccagtaatagcgatagtaggtcgcccgaacgtagggaaatctactattttcaatagaattgttggagaaagagtttcaatcgtagaagatattccaggtgtaacgcgcgatcgtatttatagcgctggagaatggttaaatcatgaatttaacattattgatacgggcggaattgatattggagacgagccgtttttgacacaaattcgtcaacaagctgaagtagcaattgatgaagcggatgttatcatttttatgacaaacggtcgtgacggtgtaacagcagctgatgaagaagttgcaaaaattttatatcgttcaaataaaccggttgtacttgcagtaaataaagtggacaatccggaaatgcgcagtgacatttatgacttttatgcattaggatttggcgaaccattcccaatttcaggtacacacggattagggttaggtgacttactagacgaagctgcacaacattttccaaagattgaagaagacggatatgatgaagacacaattcgtttctctttaattggacgtccaaacgtaggaaaatcatcacttgtaaatgctcttcttggtcaagagcgtgtaattgttagtaatgtagcaggaacaactcgtgatgctgtcgatacaccatatagtaaagatggaaaagattatgtaattattgatacagctggtatgcgtaaaaaaggaaaagtgtatgaaagtacagaaaaatatagtgtacttcgtgcgctaagagcgattgaacgttctgacgttgttttagtcgttttagatggtgaagaaggaattattgagcaagataaaaaaatcgctggatatgctcatgattcagggcgagctgttgttatcgttgtaaataaatgggatgcagtgaaaaaagacgaaaaaacaatgaaagcatttgaagaaaatatccgtgctcatttccaattcttagaatacgcaccaattgttttcttatctgcaaaaacaagaaaacgtacacaaacattaataccggttatcgatgaggtaaatgaaagtcatagtatccgtattcaaacgaacgtattaaacgatgtaattatggatgcggtagcgatgaatccgacgccaactcataatggtagccgtctgaaaattttctatgcaacacaagttgcggtaaaaccaccgacatttgttgtgtttgtaaacgatccagaattattgcacttctcatatgagcgtttcttaaagaatcgcttacgtgaatcatttggcttcgtaggaacgccgattcacattatcgctagagcaagagactaatggagaggatgtgattttatgacaaaaatcacagtagtaggagcaggtagctggggaacagcgttagcgatggtattagctgacaatggacatgatgtacgtatttggggaaatcgcccagaacttatggatgaaattaatacgaaacatgagaatagtcgatatctcccaggcattacattgccaagcacaatcgtagcctactcttctttagaagaagcattagtagatgtaaatacagtactgttagtagtaccaacgaaagcgtacagagatgtattacaagagatgaaagaaattgttactgaaccaattacttggattcatgcgagcaaaggaattgaacctggtacgtcaaaacgtatttcggaagtgattgaggaagaaattccagagcacttaattaaagatgttgttgtactgtctggaccgagtcatgctgaagaagtcggtttacgacaagcgacaacagttacgtctgcagcaaagcgtatggaagcggctgaggaagtacaagatttatttatgaatagttatttccgtgtatacacaaatccagatatcgttggagttgaacttggtggtgcgttaaaaaatattatcgcattagctgctggtataactgatggtcttggattaggtgataatgcaaaggcggcattgatgacacgtggtttaacagagattgctcgtttaggaagaaaaatgggcgggaatccgttaacgtttgctggtctaactggtatgggagacttaattgtaacgtgtacaagtgttcatagccgaaattggcgcgctggaaatatgcttggaaaaggacactctttagaagaagtgttagaaagcatgggtatggttgtggaaggtgtaagaacaacgaaagctgctcatgaattggcagagaaaatggaagttgaaatgccgattacagctgctttatatgacgtgctgttcaatgggaataacgtaaaagatgcggtaggctcattgatggggcgtgttcgaaaacatgaagtggaagctatacctgatttactgtaaagaaaagcgacagaagtacatttgtacttctgtcgcttttttattttttgggtcttttcaccattttttcatttttgcataggatgaagagtaacttgaggagagggtgaaaagaatggataataatatttttaataatattgagaaggaagcgaaagtaaataaagaggatatttttaaattagcatcatccgtgcaaaatgcgaatttacgtgatgaaactgtacttcgtcaattaattcatcaagtggctcttatggcgggacgtgaagtgccgaaagagcaagaggatcaaattgtaaaagcgattattaataataatatgccaacagattttggctcgttaagcaaaatgtttaaaaaataaattatgagaaacaaagagtttgtagattgcatatgatagccatgaaagaatgggaatagagctgtttttgggcatatttggtcaaccgaagtgagaggtacaatcgcttcggttttatttttgcctagattggtgaaaaatgctggaaaacctattgattaaagttatatattcgcaatttgtagtaaaatgttctttttgtatttgtttaaagattttaatttgttaaaatagtataaaaatagattgataaaaaggggtgtgtatatgtcagaagggcttatgaaaatgtggttagctttaggggcaattggatttatgttttttgcagtaagttttattttattaagtagacataaaataaagaataaatttttgaaagggattacagcattagtagcgtacacccttatgattgtgtcaggaattgttatttttcttgttgtatttagtggacctgtacagcagtaaatggaatggtctcgaaaatactacatacagagcaaattagattagtatgaaaaggtgatgctagtgaaaaaattacatattattttaatattttgttgtatgagccttttaacggggtgtctgtatccgaaagaaaatatgaagcaaaatgcggttccttatgaagatcagctacaggttgttcaaaaagctgttgtgacatttaaggagcaaaatgatgggatattgccaattaagacgagggatatgagtacacctatttatcaaaagtatccgatcgattttcaacagattgccccgcgttacatacaagaagcgccagggaatgcgtatgaaagtggaggagtatatcaatacgtattaatagacgttgaaacaaatccaacagtaaagttaattgatgttaggatggctgaacaaattcaggaactatctttaaagcttaggatgtatcgtgatgaacatcaatatccaccttttaaaaaagtaatttcagatggtgtatatgaattagatttcaaaaaactaggatataaagatgtgccacaagtgacaagtccatattctggtaaaggacttccttttgtaattaatgaaaaaggagaagtttttgttgattatagaatcgacttatatgacgctttgaaaaaaaatgaagggcagtttacggagggagaagatattcgaaatatactttcgaaaggttccccgtttgtaccagcttattctttaccgtacacagtaaaggatggagaaccaatttttttaaaatgataagtcatgaacctttcttttagtgaataagttctagaagaaaggttttttatgttatacaacttacgatgcaaacaaaagatattttttaatagtcatatgaaattggacaaaattatatgatatattgtccgaacttctagaataccattatattatatcagatattataggcaacgttagagaaggtattagttgactataaacgcggaattattcccaaaaattttgagggagggaatcacttggaaaaggtagatatttttaaagatattgcagaacgaacaggcggtgatatttattttggagttgtaggagctgttcgaacagggaaatcaacattcattaaaaaatttatggaacttgtagttattccaaacattgagaatgagtctgaccgtcaaagagcgcaggatgaattgcctcaaagtgctgctggtcgtacaattatgacgacggaaccgaagtttgttccaaaccaagcggtttctatcgaagtagatgaaggacttgaagtgaatattcgattagtagattgtgttggatatacggttcctggagcgaagggctatgaagatgagaatggcccacgcatgattaataccccttggtatgaagaacctattccattccatgaagctgcagaaatcggcacgcgtaaagtaattcaagaacattcaacaattggtgttgtaattacaacagatggaacaattggtgaaattccaagaagagattatatagaggcagaagaacgcgttgtaaatgagttgaaagaagtaggaaaacctttcattatgataattaatacggtacagccgtatcatccagatacagagcaattacgccaaagtttatcagaagaatatgatatcccggttattgcaatgagtgtggagagtttaagagaaacagatgtatataatgtacttcgtgaagcactatttgaattccctgtattagaagtgaatgtgaaccttccgagctgggtaatggtgctaaatgaagggcattggttgcgtcaaagttatcaagaagcagttcaagaaactgtgaaggatataaaacgtcttcgtgatgtggatcgcgttgtttggcagtttagtcaatatgaatttattgatcgagcgagcctagctggcattgatatggggcaaggtgtggctgagattgatttatatgcgccagatgaattgtatgatcaaattttaaaagaagtagtaggagtagaaattcgggggaaagatcatttattaaagcttatgctcgatttatctcatgcgaaaatagagtacgatcaagtggcggatgcactgcgtatggttaagcaaacaggatatggtgtagcagcgcctgcattagcggatatgagcttagatgagccagaaattattcgtcacggttcaaggtttggtgtgaagttaaaagcggtagcgccatctattcatatgattaaagtagatgtagagtcaacgtttgagccgatcattggtactgaaaagcaaagtgaagaattagttcgttatttaatgcaagattttgaagatgacccgttatcaatttggaattctgatatatttggacgttcacttagctcgattgttcgagaaggaattcaggcgaaattatctttaatgccagaaaatgctagatataaattaaaagaaacgctagaaagaattattaatgaaggatctggcggattaattgcgattatactataagaaaaaatccctctcattgtagagggattttttgtttttttgattataaaatagaaaaataaacagtcattatctaatacattgttgtaaattgtcaagtttcatcagattttcacattttcagagtaacaatttccttaaaaatattgaattataaaggagaatcgtataatataggcgttgataatgatttatctacatctttgtagtatagaatttgcaaaaattgcctacaaatgaaagtaagactcattttatgatcattatacagtcttatctttgggaggaggtgaatggcatgaacaagacagatttaatcaatgctgttgcagaagcaagttccctttctaaaaaggacgcaacaaaagcagtagacgctgtttttgattctatcttagaagctttaaaacaaggtgataaagtacaactgatcggattcggtaacttcgaagttcgtgagcgtgcggctcgtaaaggtcgtaacccacaaacaggtgaggagattgaaatcgctgcaagtaaagtacctgcattcaaacctggtaaagcgttaaaagatgcggttaaataatccttacatattaacagggaagaagagtttcctttttgggaactcttctttttgcttttaaaaacataaatatgctagaatgtgttcgtatcacttttaggttttcgggagggctagcggatggcaaaagttaatttagaacaaattgaacatgcagtacgccttattttagaggcgattggggatgacccaaatcgtgagggagtacttgatacaccaaagcgtgttgcaaaaatgtacgcagaagtgttctcaggtatgcatgaagatccgaaagagcatttgcataaagtattcggagaagatcacgaagagcttgtactagtaaaagatataccattttattcgatgtgtgagcatcatttagttccattctatggagttgctcacgttgcatatattccgcaaggtggaaaggtgacagggttaagtaaattagctcgtaccgtagatacaattgcacgtcgcccacaactgcaagaacgtattacatcaacagtagcgaactctattatggaagtactagagcctcatggtgtaatggtagtagtagaagcagaacatatgtgtatgacgatgcgtggtgtaaaaaaaccaggtgcgaaaacagtaacgacagcagtgcgtggtgtgcttgaaaatgatgctgcagcgcgcagtgaaattttatcgtttattaaaacgaagtaaagaaaagcgggaaactgcttttctttttttttttagtaaataaatgatatagttttaactagacagagtgagattagaaagattgcttacatgaatggtaggtgtagccaagttttggttatagaaaatagagtgtatgtgttataataagttttatgaattagaaaacaagggtgattttttgtgtgtgacatctacggagggtatgcgagtataaaagaaaaattgatggagaaattacgccatccttactttataaactatattgaagaaccatttattgatgaagaaaagatagcattgttatatggtgctttaaagagtgcaaacttacatatagaacaaattgagcattacgtagtaacaattatgcttgtacaaattgcgcttgatacgcatgaaagggtatcaaataaagcaggcgaggaagagattgaattccataaatgtcgtcaattaacagtacttgcaggcgattactatagtggactatattattatttattgtctatgaatcgtgatattgttttaattcgtgcacttgctgaaggaattaaagagataaatgaacacaaaattatgttataccaaaaagcgcatgaaacgacggatgacataatgaaaagcatagtaatgattgagtctgcgctccttcaaaaaacatgtgatcattttcagttatcacattggaagccatttatcacatacgtattaggtggaaatcgccttcaaaaagaaattcaattgtatgctgataagcaacattcgcctgtttttcaagctatgcaagatgctttaggggataaagcagaagtagtgattaatggttggatgaaggaattgagaaagaaagaaaaacaatttttagaaaatcacacagacataaatgaaataaattctgtgttaaggaataaatagaagacataagcaattttacattggaagaaggtacgagcatgcaacaatcaaaagaagaaagagtacatgacgtatttgaaaagatttctgataaatacgatgtgatgaattctgtaattagttttcaaagacataaagcgtggcgtaaagaaacgatgcgaattatggatgtacaaccaggcagtcaagcgcttgatgtatgctgtggaaccgcagattggacaattgcgctagctggagccgtaggtgaacaaggaaaggttgttggcttagacttcagtgaaaatatgttatctgtcggtaagcaaaaggtagaggcgttacaattaaaacaagtagaacttctacatgggaatgcaatggaacttccgtttgaagataatacgtttgattatgtgacgattgggtttggtttacgtaacgtaccggattatatgcacgtattaaaagaaatgacgcgtgtagtaaaaccaggtggaaaagtaatctgtttagaaacatctcaaccaacaatgattggttttcgacaagggtatattttatactttaaatatatcatgccgttatttggaaagatgtttgcgaaaagttataaagagtattcatggcttcaagaatctgctagtacgttcccagggatgaaagaattggctcaaatgtttgagcaagctggacttgaacgtgtgcaagtgaaaccatttacttttggggtagcagcgatgcatttaggtattaaaccagaatcaaaatagaaaaaagaagttttaggttaaggtgaacaatatgaagttacaacttatgtactcttttttacgatcggatattaatgtgatagaaaaagaattaaaaaagacagtcgcttctgaacagccattagtagaagaggcagcattacagcttattgaagctggtgggaaacgaattcgtcctgtatttgtgttgcttgcagggaaatttggagattataagttagatgcgattaagcatgttgctgttgcgttagaacttattcatatggcttctcttgttcacgatgatgttattgatgctgcatttttacgacgcggcagtgcgactgtgaatgcgaaatggggagatcgtattgcgatgtatacaggggactatctgttcgctaagtctcttgaatgtataacaaatatcgaaattccagaggcgcatcaagcgttatcacatactattttagaagtctgtaaaggtgaaattgaacaaattaaagataaatacaattataaccaaaatttaagaacgtatttaagaagaataaagcgaaaaacagcattattaattgccgcgagttgtcaattgggagcgattgctgctggtgctaatcgtgatacggtaaatcgtctattttggtatgggtattttgtaggaatgtcttatcaaattattgatgacattttagacttcgtttctacagaagagaaacttggaaaacctgctggcggagatttactacaagggaatattacacttcctgctctatatgcgatggaagatcccgtacttcgtcagaaaatcacatctgtacatgaaaattcaacagcaagtgaaatacaagaaattattgatgctgtaaaaaatagtacagcaattgatcaagcatttgcatttagtgaacgttatttacataaagctttagaaataataaaaccactcccacgtggaaaagcaaagtacgcattacaaaatgttgcaaagtatattggaaaacgaaaattttaatgtttattctaaaaaataaaataatctctctatttcaaaactattgcacaattgtgataagggtgataatatgtgtgtggggatatacaattacatacataattcagaagtggagagattttttatggaaaaaacatttctaatggtaaaaccagacggtgtacaacgtgccttcattggggaaattgtagctcgttttgagaaaaaaggctttcaattagttggtgcaaaattaatgcaagtcactccggaaattgctggacaacactacgctgagcataaggaaaaacctttctttggtgagttagtagactttattacatctggacctgtgttcgcaatggtatggcaaggtgaaggtgtagtagatacagcgcgtaacatgatggggaaaacaagaccacatgaagcagctcctggaacaattcgtggagatttcggtgtaactgttgcgaaaaacattatccatggttctgattctttagaaagcgcagagcgcgagattgctattttctttaaagaagaagaattagttgactactcaaaattaatgaatgaatggatttactaattattttgaaataatttgtaaacgctttaatcactgtgataatagtaaaaagtgcaaggagaataggggtattcttcttgcacttttttattttcagttagttacgaagtttgagctgttatgatatgttgatatttaaattaggcctatcggaaatatagaataagaaaatggtcgatttatgatataatttctttaatatttttagaatgataaaagttaatatagtgagataaatacatatacgaaaagaggaataacgtatgcgatatattacagctggtgaatctcatggtccacaacttacaacgattatagaaggtgttccggcaggattgtctttagtagcagatgatataaacgaagagttagctagaaggcaaaagggatatgggcgcggtagacgcatgcaaatagaaacggatcaagtgcaaattttaagtggtgttagacatggagaaacattaggttcccctattgcacttgttgttgaaaatcgtgattttgcacactggacaaaaattatgggggcggagcctttaactgagcaagaagaaaaagagatgaaaaggaaagtgacaaaaccaaggcctgggcatgctgatttaaatggtgcgattaaatatggtcatagagatatgaggaatgtactggaacgttcgtcagcgcgcgaaacgacggtgcgtgttgctgctggtgcggttgctaaaaaggtgttagcagaacttggtattaaagtggcgggccatgtaattgaaattggcggtgtacaagctaaggagattacgtatagttcaattgaagaattaaagagtattacagaagcatatcctgtacgttgcttagatgaagaagctggtaaccaaatgatgaaagcgattgatgatgcgaaagcaaatggtgattcaattggtggaattgttgaagtaattgtggaagggatgccaattggagtaggtagctacgtgcattatgatcgaaaactggatgcgaaattagcagctgcaattatgagtattaatgcttttaaaggtgtcgagattggaattggttttgaagcagcgcatagaccaggaagtgaagttcatgatgaaattctgtgggatgaggagcatggatatacacgaagaacaaataatgcaggtggactagaaggcggtatgacgactggaatgccaattgttgtgcgcggtgtgatgaaaccgatacctacactttataaacctcttcaaagtgtagatattgatacgaaagagccttttacagcgagtattgaacgttcagatagttgtgcagtgccagcagctagtgtcgttgcagaagcggttgtggcttgggaattagcgacagctttaatagaacaattcggattagatcgtatggaactaattcgtgaaaatattgagaaacataatgaatatgcgaggggattttaatgggaaacatacatattcaaacgaaatcaaaagaatatgatgtacatgttggtaaagaagcgttgtcaaacttaacaacgatcgttcaaaatatgcagccagcggtatctaacgtaatgatcatttcagatgaagctgttgcatcactacatttacagacagttatcgatgcattacaagtagagcagcacgtgttttcgtttgttgtaccaagtggcgaaaaagagaagtctttcgaaaatttctatgcggctcatacgtcagctcttgaaaataaattagatagaaattctttaattcttgcacttggaggcggaatgattggagatttagctggttttgttgctgcatcgtttatgcgtggtattcgctttgtgcaggttccgacaactttattagcgcacgatagcgctgtgggtgggaaagtagcgattaaccatccgttaggtaaaaatatgattggtgcattccatcagccagaagcagttgtatatcatacaccgtttttacagtctcttcctgaaaaagagtggcgttcaggttatgcagaggtgataaagcatgctcttatcggtgatgtggagctataccattggttaaaagaagaagtgcaaacattagcggatcttcatgatgagaagttaatccatatattaacgaaggcgattcctgtaaaggcaaatgttgtgtcacaagatgaaacagagaagggtgtacgtgctcatttgaactttggacatacgttaggacatgctcttgaaaaagagctagggtatggaaatattactcacggtgacggtgtagcggttggaatgttattcgccatatttttaagtgagcaagtgtacaaggttgatcttgcttatgaagatatgaagcagtggttcttgaaatacggctatccaaaaatgccaagggatttgaatgtagagcgcctcgttcaattgatgaaacaagataagaaagcaaatgcaggagcaattcatatggtgcttatgcaggaatatggggtagtgaatgtcgtatctatttcagatgagactgttcatattgcgttagaggcatttcaaaaagatatgatttaaaatgatagcgaagtgctgtgaagtgctcatttagaggtattctcgtaatagtgacggttatgacaaaagattacagtaaggggctataacccatgcccatcaacttaaggatagaaactctacggttttccattaattgaaatggattttgtacatgcttaaacaagcgaaaatgtacatgtttatcttgacatttacaccaagaggtaatgtattcttgagcaataattgctttacgatgaaaataagccgttttattcggcgaaatattttcaacagcacctatgagcgattgatgccaaatactagcatctttattcggtgcatgagaaagaaagtattgcatgatttgaatgcctttaaggggaataggtttatagacataggaaccagagcgcttgaaattttcagggatgttaccgccattaaaaaattcaacagcctttatataaggaacttcttctataaagagagaggggctaccagtttcaagaagaggtgaagaatgagatttacctttgtgagaaataaataaagcataagaataaagaatctacatagagttcaatgaaaacagttgcaaactgttcatattttgttatgatagtgttacgaaaacgtttgcataaaaattccgatgggatgcaaaaggagagaatgactatgaataagacatggtggaaagaagcggttgcttatcaaatttatccacgaagctttatggattcaaatggtgatggtattggagatttacaaggtattattgcaaaactggattatttaaaagatttaggtatagatgtaatttggatttgtccaatgtataagtcgcctaatgatgataatggttatgatattagtgattatcaagatattatggatgagtttggtacaatggcagactttgatgctttactagatgaagttcataagcgtgatatgaagcttattattgatttagttattaatcatacgagtgatgaacatccatggtttattgaatcacgttcatctaaagataatccgaagcgtgattggtatatttggcatgatggtaaagatggtgcggagccaaacaactgggaaagtatttttaatggttcggcatgggaatatgatgaagaaacagaacaatattatttacatctattctcacgtaaacaaccagatttaaactgggagaataaagaagttcgcgaagtactatatgatacggttaattggtggcttgataaaggtattgatggtttccgcgttgatgcgatcagtcatattaaaaaagaagaaggcctcaaggatatgccaaatccaaaagagttaaaatatgtgccatcttttgataaacatatgaatgtgaaaggtattcaacctttattagaagagctaaaagaaaatacattctctaagtacgatattatgactgttggtgaagcaaatggtgttaagattgaagatgctgagctttgggttggagaagagcaaggtaagttcaatatggtattccagtttgaacatttaagtttatgggatgcagagaagaagaaagaccttgatgttgtaggattgaaaaaagtattaacgaaatggcaaaaaggattggaaaataaaggatggaacgctttatatattgagaatcatgataaaccacgtatcgtttcaacatggggagatgacaaacaatattggcgtgaaagtgcaacagctctaggagcgatgtatttctttatgcacggtacaccgtttatttatcaaggacaagaaattggtatgacaaatgttcagttgccaaatattgaagattacgatgatgtagcaattaaaaatttatatcgcgagaaaattgcagagggcgtaccacatcaagatatgatggagattatatgggcttcttgccgcgataattcccgtacacctatgcagtggaatgatgagatgaatgctggtttcacaacgagtacaccttggtttagcatgaatccaaattacaaagaaattaatgttgagaagcaaaaaaatgaagaaaagtctattttcaatttctataagaaaatgattgctctgaaaaaagagcacgatgtactgaactatggtacgtacgatttacttttagaagaagatccacaaatttatgcatatacacgtacgttacaggatgaaaaagtcattgtaattagtaatatctcaaaagaggaagctgtgtataatgagggttcatttgcactaaaacgcaaacgtttgcttttaaataactatgaagttgcggaacatgaagaagtaacaacaattgctttaaaaccttatgaaacaagggtttatcgcatttcataataaaaaaggatgctctttgagcatctttttttatgaaaaaaataaatttctattgcaaagtgaaaacgcttttattaaaatagatttatgaaaacggttgcgcaaagataaaaataaagtaatataaggaatcgttttcataaagggaacagaaattataatttaaatcattatgttgttataaataaaggggaggaagaacagatgaaaattacgtcttttgatttttggcaaaagttcgggaaagctttattagttgttgtagctgtaatgccagcagctggtttaatgatttccatcggtaagttaattggtatgtctgctggggatgttaacgcagttcatacaatcgctcgcgtaatggaagacatcggttgggcaatcattacaaatctacacatcttattcgcagtagcaattgggggatcttgggcgaaagatcgcgcgggtggtgcatttgcagcgctattagcattcgtcttaacaaaccgaattacaggagctatatttggggtaaacgctgaaatgttagcggattcaaaagcgaaagtttcttcagtaatagcgggagatttaattgtaaaagattactttacttctgtacttggtgcacccgcattaaacatgggagtgttcgtagggattatcacaggtttcttaggagctactttatataacaaatattataactataataaactgccacaggcattagcattctttaatggaaaacgatttgtaccattcgttgtaattctttggtctacagttactgcgattgtattatcacttctatggccattcatccaaagtgggttaaatgaatttggtcgctggattgcagcttcaaaagatagtgcaccagttgttgcaccgtttgtatatggaacgttagagcgtttattattaccatttggtttacaccatatgttaacgattccgatgaactatacagagctaggcggaacatatacgatgctaactggttcaaaagttggacaagttgtagcaggacaagatccattatggcttgcatggattacagatttaaataatttactagcaaatggagatacgaaggcatataacgatttattaaataacgttgtaccagctcgtttcaaagctggacaagttatcggctcaacagcagcgttaatggggattgcatttgcgatgttccgtaacgttgataaagaaaagcgtgcaaaatataaaccaatgtttttatcagcagcattagcagtattcttaacaggtgtaacagaaccaattgaattcatgttcatgtttattgctccagtattatatgttgtatatgctattacaacaggacttgcattcgcgctagctgatttaattaacttacgtgttcatgcatttggatttattgagttaattactcgtacaccaatgatggttaacgcaggtttaacaagagacttaatcaactttgttattgtttcattagtgttcttcggtcttaactttacactatttaatttcttaattaaaaaattcaatttaccaacaccagggcgtgcaggtaactatattgataatgaagatgaggcatcagaaggaacaggaaatgtaaaagacggttcactagcaacaaaagttatcgatttattaggtggaaaagaaaatattgctgacgtagatgcttgtatgacgcgcttacgtgtaacagtaaaagatttagatgttgttgcaccagaagcacagtggaaacaaaatggtgctctagggcttattgtaaaagataaaggtgtacaagcggtatatggtccgaaagctgacgtattaaagtcagacattcaagatatgttaggtgcgtaataatatgaaattgctaactttaaactgtcattcttggcaagaagagaatcaaatagaaaagatacaataccttgctaaagtaattcaagaagaagagtacgatgtcatcgcattgcaagaagtaagtcagtccatacaagctgaaaatgtatgcggtaacaagaaagaagataattttggacttttactattagaagagttaaaagcgctacatgtaaaagattacaatattacttgggatttctctcatattggttatgacgtgtatgaagaaggattagcgattataacgaagcataatattataaaagaagatacgttcttcatttcagaaaacgaggatacaacgtattggaaaacacgtaaaattgtaagtacaacaattgcttataatggtaaggatataacgttttactcttgccatctcggttggtggaatgatgaagaagagtcattcaaaggtcaagttgatcgtttgatggagcgtgtagatagcaataagctcgccttcttaatgggggattttaataacaatgctcggttggaaggcgaaggttatgagtatatgatgcaaaaagggttgtatgacacatatgaattagcaatagagaaggatgaaggaacgactgtccaaggtgagattgctggttgggatgaaaataaacataatttgcgaatcgatctaatattgtgtaaccaaagtaaaaaagttcattcttcaaaagttatttttaatggtacaaacagaaatgtaatttcagatcatttcggtgtagaggttcaattggatatataatagaagaaatcctcacagagaataaaagctgtgaggattttttttaggaatacaagtatttccaagagaaaatacttgtattttttatgacatttcatatatatttgttattattgaatgtaaaaccgatttggtcattttgtattcatactttgactcacttcgttatataatgaagtaagtgaaagttaatgggaaaaaatagtacgtttttggttaatacacgatgtagaaagtgatataattgcaaaatgcatgtatcattttctaaagaaggaaaaatatataattaggtgataacttctatgaaacaaatttggcgtatttataagacagatttacggaatgtagccaaacattgggctgcaattgttattgttttaggattaatgattttaccatcgttatatgcatggtttaacattaaagcttcttgggatccatatggaaatacaaaagaggttcccattgcagtttccaaccaagatgcaggttctaatttaagagggaaagatattaatatcgggaaagagattgtagactcccttaagaaaaacaaaaatcttggctggaaatttgtagatgaaaaacaagcaatttacggagttgagcgtggggattattatgcaagtattacgattccaaaagacttctctgaaaaaattgcaactgttctggatgaaaatccgaaaaaaccagaactggattactatgtgaatgaaaaagtaaacgcgattgcaccgaagattacagcaaaaggtgcatcaggtattacagaagaaattagtaaaaactttgtaaaaacagcaaacggtgagatttttaaaattttcaatgaccttggaatcgatttagaaacaaacttaccaagtatcgaaaaagtaaaagatcttgtatttaagttagaagcgcagttcccagaaatgaatacacttatggataaggcgttagatgatgcaactcgagcagaagatgttgtgaaagtagcgcaaaaagagttgccggttgtagagagtgttatgaatgatgggcaagaggcgttagggaatttagataaattctttgcgagaaatgatgaaacattgaatcgcgctccgggaactattaaaaataatttaacagtaatgcagcagggattggatgctgcagcgaaaattacggattacttaaaaaatccggcatttgactttaatctgacattgccagatccagctaaattaccagtcttacctaatataactattccacaaataccagagattccagcattaccacaagtgaatggtgaagggtataaaaatattgctaaaaatattgatcaaactgtaaacactgttttcaattctactcgtgttggaacggcatatgtaaagagtgttatggatggccttcaaaataaaggcgtggatccagctgtagcacagaaaaatgtgcaggatgcttcaaagctcctccaagagcgtatcgatagtgtttcatatttgattgatttctttacagctttcaaggaatcagcttccacggaattcggtaaacagttctttggaaacagagtggaaagtttaacggtgcttaaaaattctatggtggacgctaacaatagggttaagcatgtaggagatttaattagttccggacaagaagttaaacaagatgtgcgagatgctgtaaatcaaaaattagatgcagtaaataatttagtaaatcaagctgaaaaggattataatgcaacgtttgtagctgattttgaaaaagcagtaagtacagctgagcaactgaaaagtaaggctgaaaatgcgcaagaaaatgcacagcagcttagaggcaatttaaatcaagatataaataaggctaatgagatattaaacaatggtagagagaaatatgataaagctgtaaatgattacagtagattaaaaacggagcttgaaaaagcaagagaagacttaagtaacaaaggtgttaacggattagattctacaaaagtagccttaaatgatttgaatgggcagttcaaagcaagttggaatttagttaatgacatgattccagttctggaaagtacaaataaagtgttagctgatgtgaatagtgataaaaatcttaatggtacaatttctaagttaaataaagcaaaagatggtttgcaaaaaggaatggatttaactgataaaggaattgacgctattaataaaggtcaaaaaccagcagctgatgttattgaaagtattaatcaagtgtctaaaagtgtttcgggccaaattggtgacattttagctaaatatgactcagaaatcactccaaatttcaatgcagcaattgctcgcacaaaagagatgtctaaaaatacatctcaaattttaaaagaggcagacaaaaagcttccagatgttaaaaaattactagaagattcatcaaaaggtttagtagatggtaaaaagaaattagcagacattaaagctgaaatgccagctactgagaaaaagattaaagaattagcagataaaattcgtgattttgaatctgaagaggatttaaaagacatcatacgcttattgaaaaacgatgttgagaagcaaagtgattactttgcgaatccagtaaatttaaaagaaaataaattatttgcgatgccgaactacggttcagcgatgtcaccattctatacagtgcttgcattatgggtaggcgcattattaatggtttcattattaacggtagaagtacacgaagagggcgcgaattataagagccatgaaatttacttcggacgtttattaacattcttaacgataggtctttcacaagcgtttatcgtatcgatgggagatatattcttactcggtacgtacgtagtcgataagttctggtttgtgttatttagtttatttattggtggagtcttcgtttgtatcgtatactcactcgtttctattttcggaaacgttgggaaatcgatggcgattattttacttgtactacaagtagcaggatcgggcggaacattcccaatccaaatgacaccagcgttcttccaagcgatttatccgttcttaccattcacatacgcaattagcgcaattcgtgaaacagttggtggaatgctttgggatatcgtaacgcgagatttacttgtgttaagtgctttcgtagtagttatgattgttgctgcgttattactgaaaacaccaattaacaaatcaagtgaaaaatttgttgagaatgcaaaaggaagtaaaatcattcactaaaataaaaggttcctaccgatagaggtaggaacctttttgtttaatcaaattttaatttttttaatgcttccgcgaatgggttatttaatggttcttcttcttttttctgttgtttcatatatttttgaacgtcgcgtttatcggctttgtttccagattcttttttacgtcgctcttggaatgttgataatttctcgcgatagccacatttacatgcgaaaatttggcctgcaccctcaccacgtaattctagtttctttttacattgcggacagcgagcatttgttgtacgagatacatttttacgatgaccacattcacggtcttggcatacgagcattttccccttttttccatttacttctagcattggtttaccgcaatctggacaagacttcgttgaaatgttgtcatgtttatatttcttatcactcgatttaatttcagcaacaatttctttcgtatagttcttcatttccgaaatgaatacttctttctttaattttccttttgcaattgcttcaagtttttgttcccactcaccagttagtgtaggtgattttaattcttctggtactaaatcaagtaattgacgaccttttgatgtaatgtgaatatctttaccacgtttttcaattaagaaagaattgaaaagtttgtcgataatatctgcacgtgtcgctacagtacctaatccaccagtcgattttaacgtatcagcaagttgtttattttgcgtatccatatattttgtaggattctccattgctgaaagtaaagttgcttcattaaagcgtgcaggtgctttcgtttgacctgatgtttgcataagtaactttacagttaatgtatcgcccttttcaatgtgaggtagaatctgctcttttacgtcatcagttacatcatcgtcttcaaatcgattttcgtatacttccttccaaccagcatgtaaaatcgtttttccgcgtgcaatgaatgtttcattgccgacctttgtgcgtaacgttagttgttcgtattcgaatgctgggaataaaacagctaagaaacgttttacaactaaatcataaattttgcgttctttatctgtgaatgctgcgaagttaacgtatccttctgttggaataatcgcatgatgatcgcttactttactatcatcaacaaatgatttgttaggtttgataggcttttgtaatactttatgtgcgaagggacggtattctccaacaccacatgcttttagacgttctggaagtgttccaacgatatcagatgaaatgtagcgtgaatctgtacgagggtacgttagtactttatgctgttcatacaatttttgcataatatttaatgtttctttagcagagtaaccgaactttttatttgcatcacgttgcaattcagttaaatcgtaaagaccaggagagaatgacttcttctgtttcttatcaatttccacaacagtagcattttgtttatctaaactttttacaataccatcgattttttctttattaaaactacggctattgccatttgcatcttgccaagtaagtttgagcttctccattgtttgagcttcgatgccgtagtaagtttgagctttgaagttctttatttcatcctcacgactagcaatcatagcaacagtaggggtttgtacacggccgcaatttaactgggcattaaagcgagtcgttaaagcacgagttgcattaagaccgatataccagtcagcttctgaacgtgcaactgctgaagcgtataaattgtcataggctttacctggttttaaatttgcaaaaccatctttaattgctttatcggttacagaagaaatccataaacgtttgattggtttatttagcttaactttatcgataatccagcgtgcgactaattccccttcacgtccagcgtctgttgctacaataatttcatttacatcttttctaagtagctgactttttacagcattaaattgtttaccagtttgtttaataaccgttaatttcaaacgctcaggtagcatcggtaaatcttctaaattccactttttatatttcacatcataactttctggatctgctaatgtaacgagatgacctaaagcccaagttacaatatatttactaccctcaagatagccgtttccttttttatcacacttcagtacacgagcaatatctcgtgcaacggaaggtttttcagcgattacaacgctttttgacatattaaaaacatcctttcaaatttccataagttaaatatagcatacatcttcttgagattcagtttcgctccatatttgatcggtttttagtgggatgaacaaaacactcactgattaaagtttcacttgattatgtttattgttatataggttgcttctatattaaatagaaaagtaaagaacttgttattttactagaataagagtagactttgaagtagatgaataataagcacatgggagtttgtggatacaaactgagagtatgactactagtccgtcattgaccatttgaacctgttggataatgccagcgtagggagagtgtaaaagcacatgttcaggcactttgcgtacgcgcaaagtgtctttttgtgtatctcccatcattatagttaggagatgaaaaggatgaatatgaaagaaattagtaaagtagtggatttggtgagagaatctaatccgctcgttcataatattacaaatgttgttgtaacaaattttactgctaacggtttgttggcacttggggcatcgcctgtaatggcgtatgcaaaagaagaagtagcagaaatggctagcattgctggagcgttagtattaaatatggggacacttcgtcctgaagaagtagaagcgatgttacttgcgggtaaatcagcaaatgcgaacaatgtgccagtactatttgatccagttggtgcaggagcaacttcatatcgaacagaagttgcgagacatattccggctgaaatcgatttagcaattatccgcggaaatgcagctgaaatagcaaatgttattaatgagaaatgggaaattaaaggggtagacgctggtactggaaatggcaatattgtaagtattgcaaggcaggcagcagatgaactaaatacagttgcggtcattactggaaaagaagatgttgttacagatggagagagaactattgttattcgaaatggtcaccctattttaacgaaagttacgggaacaggttgtttactaacttctgtaataggagcatttgtagcagtggaaaaagattatgttaaagcagcagtagccgcattaacgttttatggtgtagcttcggaactggcagctgctaaggcggtagaaaaagggcctggtagtttccaaattgaatttttaaatcaattagcgaatacaacttcaggtgatattgagaagtatgggaagattgtggagttagagtaagagggagtgaaagaaatggcacgcattgaaatagataaaatgtctaagctattgcaagtgtattttattatgggaagtaataactgcacgagggatcctttagctgtattgaaagaagcgttagatggtggagtgacactttttcagtttcgcgagaagggggaaggttctttaatcggagaagatagagtgcgctttgcaaaagaattgcagacgctttgtaaggaatatagtgttcctttcattgtaaatgatgatgtagaattagccattgaattagatgcagatggtgttcatgttggacaagatgatgaaggaattacatctgttcgtgaaaaaatgggagataaaattatcggcgtatctgctcatacaattgaagaagcacgttttgcaatcgaaaatggagcggattatttaggtgttggtcctattttcccaacgagtacgaaaaaagatacgaaagcggttcaaggaacgaaaggattagcttattttagagaacaaggaattacagtgccaatcgttggtattggtgggattacaattgaaaatacagcggcagttatagaggcgggtgcggacggtgtttcagttatttcagcaattagtttagcggaatctgcgtatgaaagtacgagaaaattagttgaagaagtaaagagaagtttgtagggaaggaagtgtagtattttaagtgctacatgaagaaatagactgcccaaaatttaaacaaatatttgattaaaaaagcacaaacctttttaaataaaggtttgtgctttttctttaaaacataattgaaattaagagcattccaatgccgatagaagtaaatgttgcaattaggcccggaatcataaaactatgatttaatacgtatttaccgatacctgttgtaccagtacggtcaaagttaatggcagcaacgattgttccatagtttggaatgaagaaatatccatttactgcagggaacatcgcaatcagtagcgctggtggaataccaagagatagtccaagtggcattaaggcacgaactgttgctgcttggctgtacagtaaaatagatagaatgaatagtgcgatagcaaatagccaaggtgcacttgttactaaatgctgaatcgatccttgaatcatatttaagtttccattaaagaaagtatctcccatccaagcgataccgaaaatagcaacaactgctgttgctcctgctttaaagacgttaccagatacaatgctttctacatttggtttacagaaaataataataagagccgcgatagttaacataaccatctcaattgtgttcggcatggaaagacgggctaacttcccatcaactatccatcctggacgaagtgcttcaaatgaaccaagaagtacaacaaggaaggttcctacaaggaaaaggataactgataattttgcgccctttacacctacaaattcttttttctcttcaagcttaggaattaatccttcttttaatcgttttaagtattcagggtcttcatttaattcttttcccatcttactagcaacaaatgcagctatcatacaagcgatgaaagtagaagggatacttacttttaaaatatctaataaggtgattttatagtcagctaacattgctaaaagtgcaactgttgcagctgatataggactagctgtaattgcttgttgggaagcaattacggcaattgacattggtcgttctggtctaattccggattcgcgagagacttcagcgataacaggaagtacagaataagcaacgtgaccagttcctgcacaaagtgtaaataaataagtaacaattggagcaaagaatgtaatgcgttttggattttttcgtaatgccttttcagctagatgaacaaggtagtccattcctccagcggcttgcaaagcaccagcagctgtaattactgccaaaatcataagcattacatcgataggaggcgccgttggttgtaagtggaagacaaaaacgagtattgccataccaactccacccattactcctaaaccaactccgcctaggcgtgcaccaataaaaatacagagtaacaaggtaagaaattgtagccaaaacatgataaactacctccgaaattcattagttaagatatattcgaatagtttaatttgaatgaaaattaaataaatacccgaagaaatccttgttatttatacattttttattatataacataaaaaaagtaacattcacgtactttttgaaattattttgaaaaagcaattcattaaaaatttgtatttatatctctaaataagtagacattttgatttatatgttgtaatctttgaaagagaataaattaattctcatagaactcccatatcgttcaactcgttcagcgagaaaggcaaactgatggaaacatgaggacgcaaaactacaggagctaaggtcgaaaggctacgctagccagttaccggacggatagggttggtcttggccaatgcttttacattggcttttttttattctcgaacatattgagaaacattttcaaacaaaatattcatatattttgttttttttgtttatgttgattaaggaaggtggatattaatgaaaaaatattggcataagttatcgttccttcaaaagaacgtcttattaaccgtattagttattttgacacttgttggaagtatgggtgcattaagttttaacatgtttcaaaatagtatgatgtctttatttgaaaggcagtctattgaaacaggagaaatagtattgaaaaaactggatgtagaattagttagagacatggcgaaagatcctacagccgaaaaagtgaaaaaagaaaagttaacagagaaattagatgaagtatcaaaagaattgaaaagcgttggacaaacgtatgttacaggagcaaagccgaatgaaaagcgagaattacaactcgttggtttgactacagagttaacaaatgcgtttcctataaagccgggagattattatgaacaacccgctcattggatgaaggcatacgataaagtgattgatacgaaaaaggctcaaatgacagaagtatatgaagatgaaataggttcgtgggtgacaatattagaaccaattacagatggagaaaacaatattgttgcaattattgcggctgacttagatgcttccattgttcctattacaaaagagaagtttatgatacagggcttactcttcatcattatttcattagcaattgcgactattactcaattctttatcgtgcgtcactcgctagctccattaaaagatttacgagaagggttacgtaaaattggtgaaggtgacttaagtattaaattaaaagaaagaccagatgatattggaattattaatgtttatttcaataacacaattgaaaaatttaaagggattatagataaagtaaggcaaactgctgagcaagtttcttcttcttcacaagaattgtcggcgagtacagaggaaaacagcatggcagttcaagagattgcaagttctattgaaggtttaagagtaggggcacagtctcaaaaaacttcagtacaacaatgtttaggaattgtacatggaatggaagataaggtagaagaaataactggggctgcaaaacaagttgcggttgcttctgaaggtatggaacaacattcaattgaaggtaatgaagtgattggacaaattattaatcaaatgagtttaatccaaaatgcagtacaagatttatcttccatcatttattcgttagaaacaaggtcaaaagaaattagtgatatcgtaactgtaattacaggtatttcaaatcaaacaaatctattagctttaaatgcttctattgaggcttcacgtgctggagcagctggaagagggtttgcagttgttgctgatgaagtacgaaaattagcagaacaaacggaagcgtctgcaaaagatatagcgaaattaattggtgaaacacaagctgagacagaagatgctgtagtttccatgcaaaaaggttcaaaagaagtagaaactggaatttcgcttgttcaaagtagtggagatttctttgaaaaaatctcaaaatcagcgcaatctgttacagatcaagtaaaagctgtttccggtaattcgagtgacattttacaaaatagccagaatattgttcaagtcgtaaatgaattatcacatattgcaaatacttatgccaacagcagtagtaatgttgaagaaagcatgaaagagcaagaaatatcagtacaagatattgcagaattagcgacttctttaagttggctttctcaggaattgcaagagcttattggtgagtttaaaagcgaataaggagaaagttcaattctaatcaaggggggtatctccgctactgattatgaattgaacgaatctgccctttaataagggatgaaaaaggtgtgaattttcacacctttattatatttaagagaggaatttacataaatatgaaattagtgatttcttataatgagatgataaaagaatttttaggaaaagtagaaggaagtattaaaatacctaaagatgtgcacggaacagaacttaggataaaaaggaaaacggaactgttttcaaatttgactcacattgtagatttaataggagcgactgcaacgtggttatatcatatttctaaagaaaaacatattgtcatgctttatcatgtaagaggaaatttatttccaattactattgaagtttctaattttctctcctatgaaagtttaaatttacaaattgaagagcaactggagcaaattaaagaaatgaatgaggaagaaatagaagagtttcaaaacggtaatacattatatgaaatgtcacctattattattggtgaaacatattatgagctacaagacacgaatacattacaatttgtatttagtaaaaatatgcaaagtgtagaaataatatttaatagtgttaattggaaagagacaacgattactcgttatgcacaacaaatacaaggtgttttagttgatatatcacaaaatactaataagtatataaaacattttaatattattacagaggccgagatggcactttatagtcaagtgaatgatacgacagcagtatatcctgagaaaagtatcgtcgatatgttctataatactgttactcaatttccaaatcgtatagctttatcttcaagggaaggtactttaacttatgaggagctaaataaaaaaagtaatcaaatagctcatatgttaattaaaaacggcgtccaattaggagactatgttggaatatttatgaaacgtagcatagacacagtagtaagtatggtagctatattaaaagctggtgcagcgtatgttccgattgatccagattatccggaaagtagaatacagtacattattcaagatagccaagcgaaagttatattgatgaaagagacgcctataacatgtgatggggttcaaacagtttcattgtatgatagtgaaacttatgaagatatagatgtaaagttgtctattcattgtgatgatgtagcttatatgatttatacatcgggttcaacagggaatccaaagggaacgatgttagcacatagaggcgttgttaatctgtacacttggatgaaaaagcaatatgaattgacagaagaggatgtatttgctcaatttccttcctttagtttcgatgcttctgtatgggagtcatttgcttctttattctgcggaggaaacttgtatgtactattagaggaagagcgattgtctgtagaggcatttgcaaatgcaatctataaagtgaaagcaacttcaatcttggcattagcaacaatttttgttcgacaagtagcaacttatttagcagaagaagatatatataagctagcttccctaaaaagaattgcgattggtggtgaaatgttgcctgtagaggttattaaattgtggagagaaagaataggtacaaatgttgaaatttataatgtatacggaccgacagaatgtactgtagtgacgacaacctataaaatacctagtcagttaaatgaggatgttgcgagtattcccattggtaaaccatgtgctaattatcaagttatgattttggatgagaatatgaatctttgtccaattggtgtacctggtgaattatatatagattcagtgggattagcaaaagggtattttaataagcctaataaaacaattgaagcttttattccgaacccttttaatcctatagttaatatatataaaacaggtgatatcgttaagttgctagaggatggaaatatagagtttttacatcggaaagatgatcaagtaaaaattagaggacatcgtattgaactaggagaaatccaaagtaaaatttctcaaaatcataatataaaagaaaatgctgtttttgctaagaagagtaaggaaggtagccaatatttaatcgcgttctatacaactttaaataaaaaagaaataccagaattagtttatcagttacaagagcaattaccagattatatggtgccatctaaactaatttatattaatgaattaccacttacacctaataaaaagattgatgttaagaagttagctcagttagaagaaaagtatgaaccggttcggctacaagaatatgttgcaccttctaataaagcagaaaaacaaatcgcgaacgcctgggcggaagtattaggaatttcaaaagttggagtgcatgatgatttctttacaattggtggacattcattaaaagtattacgagtcttaacattgttaaaagaagatttctcacatttaacaattcaagatttctttaaagaaagaacgatatatggattagctcgaattgagcgagaagtaaaagtagagaaagaagaagtatttcgtgaatataaagtgattcacgagccagatactatcacgtatgcaaacgttttggaagaaatccagatttcaaatgtctttttaacaggagctactggttatttaggatcacacatattatatgaattgttgagagatacatctgctactatttattgtttagtaagaccaaccaaagatgtgcagcaaagaattatagatacattaacaggctactttaatgatatatgtgaagaatggttacagcgtatacaggccgtagctggtgatctgggagaagagtatcttgggatgagcgaagaagaatttatgttcatcagttctaagatggatacgataattcattgcggtgcagatgtaagacattttggagatgtaaaacaatttgaaaatataaatgtccaaggaactagccgtatgctagcattagcggagaaaggtgctacattccattttatttctacaattggtatcccgttagaattagcggtagatcaatgggatacatacatgaaaactggtgattttaattacagtgtagacttagagaatgtatattcaaatagtaaactacaagcggaaaacattgttcgtgaagcaatgaaaaatggtttgcgcggaaatatttatcgtgcaggtaatttagcatgtcattcagaaacaggttcgttccaacaaaatattgaaggaaacgcattttatcgtcttattaaaacaatgctattaattgggaaagcaccaaatgtgaagtggaaagttgatttcacaccaattgattttgctagtaaatcaattgtatcgtatttacaagatgcgcaaattgtaggagagacgttacatatttgtcatccacatcaaattgagtttgaacaatttatacagctaattggagagtgtggatacaatcttgaaatggttccactttcagaatatgtaaataccggacttgcattagcgaagggaaatgaagtaatagcagagttaattgcttctcaagttgcaggagatggagcacagcaatctgaaattgtaatgggtacgcgtagaacgaatgaatggattaagaaaaaagaattgatagtaccagcaattaataaagaatttatacagcagttattagctcatggtgaaaaagttggttattttccaaaaataatgaaatgattatgcatgcttttgtttgttcaataaaataaatcatgctacaatgaaaacgaattaaggaccggggagccaattggctgagaggatgtaagtaaacatcgaccctcaacctgatctggataatgccagcgtagggagttacttaaagtgatgtagcatatgttattctgtaataacttgcatacaaggctttcctacgcagtaggaaagccttttcttatttttgaaatttaattttataagggggattttattatgtcacaacaagttacaatgtcattttcagtagtaccacaagcgaaaacgaaagatgtatattctgttgtcgataaagcaattgaagttgtgcaacaatcgggagttcgttatgaagtaggggcaatggaaacaactttggaaggagaattagatgtacttcttgatgtcgttaaacgtgcgcaacaagcttgcgtcgatgctggagcagaagaagtgattacttctattaaaatccattatcgtccaagcactggtgtaacgatagatgaaaaggtttggaagtaccgtgatgaatatgcaaaaccagaagcaatctaaacttattacaactatttggcttatccttctcattgcgatatgggaaggatctgtttcattatttaaaatcgaaccgtggattttaccaaagccttctgccaatgttcaagaattaattgggatgaaagatttactattaccaaatacgatgcaaacactgcaggaagttataattggactattctttgcaattttattggggacgagtatcgcaattattatggacgttataccgttatttcgtattttaataaatccattgctcgttatttcgcaaacaattccaattgttgtacttgcaccgctatttattatttggtttggatatgggatgttgccgaaagtaatggtcgtaatactcgtttgtttcttcccaattgcgcttagtattttagaaggttttcaaacagtagataaaaatatgctgaaactgttacaaacaatgaaggcgacgaaatggcaagtttaccagaaagtaaaatttccagcagtgctcccatactttttctcaggtttaaaaattgcagttacatatagcgtaatgggagcaattatcggagaatggctcggtgcaagtgaaggattaggcgttatgcttacgagggctacaaaatcctttttgactgcccgagtatttggtgttgcagcaatcatcgttatggtgacattatgcctgtattttatcgtagagtttatggcaagaataacagcaccatggatatatagaaaggacggcagaaaatgaaaaaaggtttgaaagttatgttagctgccttagtagcggtaggtgtggctggatgtaatccggcgaagaaagaagaaagtgcaagtaaagatcaaaaagtaaaagtagtattagattggtttccaaatacgaatcatactggcttgtatgtagcgaaaacgaaagattattacaaaaagcaaggattagatgtagaaattattcaaccaggtgacaatgtaacagcagagcaaatgatagcatcaggaaaagcagacttcgcaataagcgcacaagaaaatgtaacgttagctcgtgtagaaggaattcctgttgtatctgtaggagcgattattcagcataacacttcagcgtttgcatcgcttaagaaagacaatatgacgtcaccgaaagattttgaaggtaaacgttacggcggctggggaggaccagcagaagaagcgacattaaagacgattatggataaacatcaagctgattttaataaagttgaaaaaatcatcttaggacaaacagatttctttaaatcaattggccgtgatgcagatttcgaatggatttattacggttgggatggtattgaagcgaagcgtcaaggaaaagagttaaatacgattatggtgaaggacttagatccagcgcttgatttctatagtcctgttattattacgagtgaaaaacatacgaagcaagataaagactttgtgaaaaagtttatgagtgcaacgacagaaggttataattttgcaattaaggaaccgaaagaggctgctgatattttaattaaagctgttccagatgtgaataaagatttagttcaagaaagccaaaaatggttaagtacgaagtatcaagatgatgctaaagcatggggagtacagaaggaagaaatttggacgaattacatgaatttcttatatgacaacaaagttattaagaagaaaatcgatgtaaaagatgcttttacaaatgaattccttccaagtgaaaaatgagcggattacaaataaaaaatatagtgaaatctttcgacggaaaaaatgtattagagaatattagtgcctctatacaagagggagagtttgtttcctttgtaggaccgagtggttgcgggaaaagcacattattaaacatgattgcaaatgttgaaaaaccaacaaacgggaacgtaacgtataacgataagcaagtacaagaacaagatgttgttagttatatgccacaacaagatttattgctaccgtggcgatcagctttgcaaaatatcgttcttccattggaaatcgaagggaaaccgaaaaaacaaaggctaacagagggaatggaagcattaaagcagttcgaactagatgaatatgcagaccattatccagatgaattgtctggtggtatgcgtcaaagaattagttttctgcgcacatatttatgtgaaaagccaattatgctacttgatgagccttttggtaaattagatgcatttacaaaaatggaagtacatagctggcttttaaactcttggcatcaagagaagcaaacaatcgttatggttacacatgacctagatgaggcaatcttgctttcagatcgcgtatttattttatctcaaagaccagcttcaatagttggcgaggtacaagtgaaattacctaggccgagaacgatggatatgttaacatcactcgaattaaaaaaggataaagaagagattttaagtgtgttagctccttatatgaaaaaatagaaaaagctgatgttttaattttagacgaacggactaatcatttggatgtagaaactaagatggctttataggaagcattacaacaatacaaaggaacggttttaattgtctcacatgagccttctttctatgaatcgtggataacaaaagtatggaatatagaagattggaatgctgaacaatatgaataaagaaaaggcattagcttttatgagctaatgccttttctttgtgattaacatgattttcgagaactcttacatgagaattgtatgaagaagcactcttatggtgcgcttataagcgtgctttttcttttgttatatttataataatacgaaagcctttccctaacaggtgactatctttctttatatatatagatagttcaaaatggaatgaaaataattcctttatgtaaaggataatatggatattataggaagacaatagaaattaaaggaaatccatgtaaaattcaaatgaacttcatataaacttcatattagaaactaaatataattataacaagttattgagatgtttttgatttttcataaaattaaaagtttgaatttaggaggtattgctcaaacctaaattcaaacttcagtgaagtaattaatggatattacgtctagttttcgctaatgacggcatttaaaagttcggcaggattacctgttcctgcaccgccaattgtaatagatccaccaggaggaatttcaccattccatcctgcgttcgtaattacataatgattatttgttttactactaattttagaatcccaaacttgtgttaaattgccgctataatcaaattctaatttccaatttttaatagggttcgttccattatttttgattataatcgagaagttataaccgctgccccaattcgaagtgactgaaaatgtagcagtaccatttccatcaggaggtgtcgtattagcttcatccgttttgacagtaagagcggtaggttgtgatttatttccagcagcatctttggcaattattgaaaatttgtattccgtattaggttttaagtttttaattgtaatgctatttgttgttgtactccatttctcttctccagcagtaatttcatattccgtaactcctacgttatcagtagatgcagtccagtttaattgaactgagtttgaatttttattcgtaactacaatgtttttaacattcgttggtggctcagtatctttttgattaataggtccaccaagtaattcttttactagcgtatcaagtaattttggaccactgcaactatattttggacttgtacggcaatctccgcttagttcccaaaacattgctccacttaaacctttcgtctttatatagtctgttttgtatttcatagattcattgtcatcgtagctaataaatgtgcctgtagttgcattatataagtaaggtactttagctgtgtcattccagtagcgtacaaaaccatttttattaacgtaattggctgctaaatcaccgtaatcatagacacctgtgtcaccggtagagtaatcatcccaagtacctttagaagcaagtttcccatcactacctggtttgcaaggttgatattgtccgttattttctttgccacaacttttccagccacgtccgtaaaagggtacgcctaatactagtttatcgactggaacaccttcatttgtataaacatttatagcaccatctacgtaaaaattcgtatttgctgctggatcatttggatccttatatagagctgcattatgattagaagtagcttcccatccgccgtggaaatcatatgtcataatattaatccaatcgagtatttgagaaattttctttagttctgtatgatcagcgtagcgttggcttgcacctgaagcgattgttagtaaatattgtttgccatcttcagcacctgctttattcaaagcatttcggacgtcttgaagaaggagagtgaaattttgtttatcttcaggacgataactaccaccaggaatcgtttcaacgcccggatattcccagtctaaatctacgccatcaaacccatatgcgcgaagaaaagctactgtagattcagcaaatacttttcttgttttttcatcagcggccatatcagaaaagcggttagaccaagtccagccaccaacggaaataattgtttttaagtgaggatatttagcttttaatcgttttagttccccgaaatttccgcaacgggcatatttatcgcaatcttcccaagttgtccctgagccaggatacgatttggtaacatcagcccatggttccccgagtacgagagtaccattaggaacctctttattttgcaatggtacaccagattctttacagttccacgtttgtttatttggattatcaggatgagtagaagggtttccatgttttccattccaacaaatatccgcgaaagcatagttaaggtgagtaagttttgatgcatcaatgtcagcaacttgataattacgtccgtaaacgccccacgaaggaaagtacccaacaattttttgactttgctttggtgaatctgctaatgcgagatttggagtaataaaatttgtgagaaaaagaggtaagaaaagtagtagggatagtaatagcagtgtgaatttttgagacctcatagccatttctcctttcaaaataaaagatatatttaaaggcatacgccaataaatcaaaatgaatctagacgtgtgaaacgtctagataaaatgatcagacatcacgaagtctatacaagggagctgggggtgattaaatcgtaacaaatgtaagatttagtgtaaacgctttattaagttgaaaaagactttctcaatacaaaaaggcttgaatacaaactatatatgaaaacgaaagattggtatgggaggaaatagctcattataaataaatttgagaaaaaattgtatggagccaattattaaagacgtagaaagataaggaaatatcatgtaaaataatagtaaaaatatgtaaaggagggaatagtgtggatgtgtttttgaacattgctgaagaaaaaattcgacaagcaatacggaatggtgatcttgattatcttccgggaaaaggaaaaccactacaattagaagatctttcaatggtacctccagaacttagaatgagttataaaattttaaaaaatgcgggaatgattctaccagaaatggaactacaaaaagatatattaaaaatagaggatctaattgcttgctgttatgatgaagcagagagaaaagaattacaagaagagttaacagcaaaaacgcttcgttttcagcaggtaatggaaaagagaaagattaaagatagttcagcttttcgtatgtatcaagacaaagtatttcgtaaattacgctaagagggataagatgactacatttaaaacgatagaagaattagcgacctatatcgaagaacaacaattggtacttctgtttattaaaacggaaaattgtggtgtttgtgatgttatgctaagaaaagtaaattgcgtattagagaattatgattacgtagagaaaatagagatattactacaagacatgcaggagattgcggggcgatatggagtatttacagggccaacaattttattatttcataatggaaaagaaattcttcgtgaatcacgcttcatttcacttgaaaatctagagagaaccattcaattattcgaggaataagggaggcttttaaatggaatttattattgtcatactattatttgttgtagttggaacaatcgtaacagcagttcgatcgaacaaaaagaaggtaaatcttacaaaacaaaataacattcataattcatctaacagctcatcaccattatttttctttgctggatctgataatgatagctcgcatgatggcggctcacatgattgtggaggatcttttgggggagatagcggaggaagctgtggtggcggtggtgattgataaaaatgcgccttatataggcgtatttctttttaaacaaacgtttgattagtcggcttacatatgcataaacacagttaaacaaacgtttgattagtcggcttacatatgcataaacacagttaaacaaacgtttgattagtcggcttacatatgcataaacacagttaaacaaacgtttgattagtcggcttacatatgcataaacacagttaaacaaacgtttgattagtcggcttacatatgcataaacacagttaaacaaacgtttgtttaatatttttaacatactaaggggaatggaaatgaaaagggaaccgaaagtgaaaaataaggggaaagtagtgttatttttattagctgcgggaggcgtatttcttgttaaattagcatttaaatttggaaccatacatatgattcgaacttggtttgaaagtacgttttcttaaataaggaatatagcctcttgcgatagaggtttttgatttgttattattagactgaacggtcggtttaaagaggtgtgaatatgagaagaagcgcagaagagataaagaaagaaattgcatataaagcagaaagtctattttcacagaagggctacgcagctacatctatggaagagatttgtgaaattacagagcgaagtaaaggaagtatttattatcactttaaaagtaaagaagaattatttttatttgtagtgaaacagcatacgtatgattggattgaaaaatggaatgaaaaagagaagttgtatagcactagtactgaaaaactatatggtctcgcggaatatcatgtagaggacatacagcaaccaatttcaaatgcaatagaggaattctctatgagccaagttgtaagtaaagagattctggatgaactgttagctttaactagagaatcatatgttatgtttgagaaattaattgaagtaggtatacagtctggagagttccgtgaagataatactcgtgatcttatgtatattgtaaacggattattatcaggacttggagtgctttactacgaattagattataaagagctgaaacgtatttataaaaaggcaatagatgtattgttaaaaggaatggcagctgaataataggtcagttgcttttcttacaaaataaattagaccgaacggtcggtttatgaaaggggaatgaaaatgaacgctttatttaaaaaccgagcatttatgctcgttatggcgtctgatattttacaacaatttgcaatttggatcagaaatatggctcttttgtattttataatggagcgaacgaataatgatccagtttctgtttcgttgttatcagttatggaatatgcacctatttttattttctcgtttatcggtggtgcgctagctgatcgctggaatccgaaaagaacaatggtcgctggagatgtattaagtgtactgtctattataggaattgtcttgttgttaaagctggattattggcaggctatattttttgcaacactcatttccgcgattgtaggtcagttttctcagccctcatcttcgcgtatatttaagcgctatgtaaaagaaggagaggtagcaaatgcgattgcatttaaccaaacattacagtcattatttctgatttttggaccagtggtaggatcgcttgtgtatacacaacttggtttatttacatcactatatagcttaatcattttatttttgttatctgctatcgccctttcattcttaccaaaatgggttgaaaaagagcaggtggcgagagactcattaaaaaatgatataaaagaaggttggaagtatgttcttcatacgaaaaatttacgtatgattacgatcacttttacaattatgggtttagctgttggattaacgaatccattagaagtatttcttgtaattgaacgtttaggtatggaaaaagaagctgttcaatatttagcggcagctgacggaataggtatgttactcggtggtattgttgctgcagttttcgcttcaaaagtgaatccgaaaaagatgtttgtattcggtatgggtatattagccctttcatttttagtagaagggctatctacatcattttggattactagtttcatgagatttggaacaggtatttgtttagcttgtgttaatattgttgtcggtacgcttatgattcaacttgtaccagaaaatatggttggaagagtaaatggaacgattttaccactgtttatgggggcaatgctaattggaacttcattagctggaggattaaaggaactaacttcactagttactgtgttttgtatagcgatggcacttattttattagcgatagggccagttgtacgtatgcaaataaagaaagaagatatcgctaacaaagaggcactaacaaattcattagcttcaaaataactattgtaagggagcaatattgctccttttttctttgaggaacttttgacaactatatgagccaattatatactgatgttgtaaaaacgattttacaggttaggagcaatggtgtgaaaaatcaaatctatgaattacgcactgaaaataatatttcacaaggcgcattagctgataaatgtaaggtttctagacaaacgataaatgcaattgagaataataaatatgatccaagcttagcgttagcgttccgtttagctgaagtattaggaacaactgttgataaattatttttgtacaagcagtagagtcgttcattataaggcgcacctttaaaaataaaaaagatcctcttcttatgagaagaggatcttttcttatagcgttttagtctttggactaggtggtgtaacggatgtattattttctggaactctagttagtaagaatcctccgataataaatagaacaataatactaagaacaccagcgtttgtttttcctgttaattgcgttgtaacaccgactaataccggacccataattgcggcaaacttcccaaatatattataaaatccgaagaattcattagcagattcttttggtactagttttgcaaagtatgaacgacttagtgcttgaataccaccttgagatgtagcaactaacattgctaaaatccaaaaatcaagtgtcgtttttaaaaaataagcatatgtgcaaataatgatataaataatgataccgacatatagcatttttttgccagtaaatgtttcagataattttccgtatagtaaagcaaatggacaagcgacaatttgtgttacaaataatatgattaatagattcgttgcactaataccgagatcggttccgtaagcggtagacatagtaataattgtatcgactccgtcaatatagaaaaagtaagcgattagaaacataaatacagttttatattctttaatatttttaaaagtatcagcaagacgtttgaagctcattctaataggtcttggatgacgctcaatatagtgtgtttgctctacgttttttagcattggaattgtaaataacccccaccaaagagctgttattgcaaaggaaatttgactagcaatgccgaccgataagggaatagttcctttttgagaaagaataataagagcgatacaaccgataaaaggaattgtactcccgatataacctaatgcaaatcctcttgtagaaattcggtccattctatcttcagaagtgacgtctactaaaaatgcatcatagaaaatgtttgctccagcaaagccgattaaggcgagcatatagcaccctagcaataagtaccactgagaggttggaacgactgctaacatacttgtaaatacgataccgagtccaaagaagaatgtgaaaaaacgttttttaaatcctttataatcagcaactgtgccaagaataggagcaagtatagaaattaaaagtgttgcgaatgagtttgcatatccccaatatgctgttgaagttgccccagatagtccagcttcttttgcagctgctttaaagtaaattggaaataatgcagttgtaatgacgagcgagtatacagagttcgcccaatcgtataatatccagcttttttcttgtctggacatttttttcatataatgttcccccttaaatttgttttactaacagtgtacaaaaataaaaattataaaaagagaaacagtgatgaattttacataacttttacatatatacacagttctttacaattggagtaaatcctctacaattgctccgtctgtttcacctaagtgtaaaccgagtagtctagcgatagttggaccttcatcaataagtctcatatacgggacggtaaagccactttttattcctttcccagcagcgataaaaattgtttcatagttaggttttgttggagagtatccatgcgtaccaaatgtatattttttactaggcgtaacatctttttcagtaatttcttttataaaatctcctgtatagttttcagtgaaataatacccttctcgtgcttctaacatgaataaacaattaacgtctgcaccgcagtctttggcagcttcatcatgaagtataaattcaattccgttttgtttattttgaagtagttcttcaaggagtagttgtacctcccggattgtatccgtatcatttttgtcccttacatatacataggcagagccgtcgcaactttggcaataggctttccagtctactaattttccttttttattaagagatataagtcctctttcatggaatagcacatttaattggatggatttgttttcacttaaagcgctatgatcaccaagggcaataattgtactttcttcgtataggtcactttcttttagtgcttgaataattttccctagacgttcgtcgtgtctctggatagcagctgttgtttcgttagattcaaagccgtgatagtgtctttgtgtgtctagatcggtgaaatgtacgaacatgacattaggctttttcgtctggattgtatgcacagcagaggcgaggacgaaatcatccagctctggttgtgataaaccatttcttatatggccgaaacgacgatttaaatctaattggtatagtgggctaccgctaaataaggaaactaacacttgattttgccaaggtctattggggaaaatttctggtaaattgtaatcgatgttcgctcttccagtaacaggccatagaagggcagctgtcgttaaatttgctttgcgcgcttcatcatacaatgttgttccttttattgattttcggtaccaatgccaatcaggtgattcacgccctggttgaagtaacgtattgctaacaacaccgtgcttgttagggtaattaccagttacgattgttgagtggcttggatatgttacagaaggataaattggttctactttttcgacaaccgtgcccttttttattagagattggaaatgaggtagtttttgtagtataggaaaatctaaagctgataaacagtcgaatgataaaatgatgacgtggtttgttaatgctttatccataaagttccctcctgattatataaaacctattattatatattactattaacacctagtaataaatacatatatttaggtgaaagtttattatttattttcagaaaaattaaacatataattaagtataagggaatctatggagggagggaacactatggattggttagatggatttggtattttttacatcattggcggaatcacgattatccttgtatttactatttcatatttactaaagaaacggtttccagacaaacagtttgatattatatttgcacttagtttaatacttctttgcttagcgtcctttcccgttacaatgatggttattggtgggtgggaaggaatgggatatggatttattggtttcttcgtcctaattggtacacttatcggtatgattgcacatcaacttgtgaaaattacgcggaaaagctacgtataaaactacaaaaaatgaaaaggatatataaaaataagaaaattagctattgttttaaaaaagaatttgtattatgataatcaacaaatttatttcgttataacgatgaaaaaggactagtacatgttcaacctttttagcagagagagaatccgtcaggctgaaagattcttaaaaaggcaatatggaacctgcctttgagttctgcatatgcagcgggaatttcccgttatcaaaaagagagcatgcgcaatttttgtgcatgaatcagggtggtaacgccggcaaagctcggtccctatttagggacgcgggcttttttgtattttctagaaggaggaagactgactatggcaaaagaacaagtgcaagccattacgaagatggaagaggactttgcgcagtggtataccgatattgtaaaaaaagccgaacttgttgattattcaagtgtaaaagggtgcatgattttacgtccgtatggctatgccttatgggagaatatgcagaaggtgatggatgagaagttaaaaggaactggccatgaaaatgtatatatgccaatgtttatcccagagagtttattgcaaaaagagaaggatcatgttgaaggatttgctcctgaagtagcatgggttacgcatggtggagatgaaaagttagcggaaagactttgtgtacgtcctacatctgaaactttattctgtgagcacttttcaaaaattgtgcaatcctataatgatttgccaaagttatataatcagtggtgttcagtagttcgttgggagaagacaactaggccgttccttcgtacgactgaatttttatggcaagagggtcatacaatccatgaaacggcagaagaatcgcaggctgaaacattaaatattttaaacttatatgcttctttctgtgaggattatttagcaataccagttattaaaggacaaaaaacagaaaaagagaagtttgctggagcaaaggcaacttatacaattgaaagtttaatgcatgatggaaaagcacttcaaacaggaacctctcataactttggcacgaatttctcagaagcatttgatattaagtttttagatcgtaacggtaagtggcaatatgtgcaccaaacatcttggggtgtatcaacaagaatgataggcgggctaataatggttcatagtgataataatggacttgtaatgccaccaaaagtcgctccagtgcaagttgttattgtaccgattgctcagcataaagaaggagttttagcaaaagcaatagagttacaagaacatattcaaaaggttgcacgagtaaaaatagatgctagtaataaaacaccaggctggaaatttaatgagtatgaaatgaaggggattccaattcgattagaagttggccctaaagatattgaaaagaatcaagttgtacttgtaagaagagacacgaaggaaaaagagtttgtaccaatggatcaattagaagaacgtattccagcattacttgaagaaattcatattgctttatttgataaagcaaaagcatttcgcgatgagaatacgtatgttgcgacaaatttcgaagagatgaaaaaaatagctgacgaaaagcaaggctttattaaggcaatgtggtgcggggaattagcttgtgaagaaaaactaaaagaagaagttggagtatcttcacgttgtatgccttttgagcaagagcatttagctgaagaatgcatttgttgtggtaaagaagctaaacaaatggtgtattggggaaaagcgtattaatactttttctgataggtgataaaaaggactttgggctgcataataaaatgcaatccaaagtcctttttagttttataaagtatttcatgtattctttagatggaagtatgttgctcttattttacgtttttacgacgaataaacagtaacataccaattaggaatattgaaagacccattaaaatagatatagggtaatgcgttgcggtattcggtaatttatcaccttgttttttcgtattatcttttacattacccccttgagaaccgttgccctcctgagaattgctatcgcctttaacacgattgccaccttgagagccattaccgccgtgtgagccactgccaccagaaccatcgccaccagaacggttaccaccagaaccgttaccgccagaaccgctgccaccagagccgttgctaccagaacggttaccaccagaaccgttatcgccggaaccattgccgccagggccactgccaccggaaccattaccgccggaaccgttgccgccagaaccgccagaatcactgccgctagaaccgttgccaccagaaccgttatcgtcggaaccattgccgccagggccactgccatcagaaccgttaccgccggaactgttgccgccaaagccaccagaaccgttttcaccagaaccgttttcaccagagccgctgccaccggaaccactatcgtcctgagaaccgttatttcctggaggtttattattatcctttgagtttccttctgcaaaatgatcgctattttgtacaatagcgtttgttaatggttggaagttttcagttgcagcattaccgatatttaaaccgctaaaaaaagatagagagagtgttgatgctaaaatgaagattttcgtcatggttttcctcctaagaaatgaatgttccatctaaaatacatccctttgtaatatttcttaggaaaaagagttttatgcaaaaaaaactatatatagaaaaaggtggtatatttgtcaaagcagaaaagagttaatgtagatttcctacaaataatagaggtggagaatttacattcataacggtagaggaagtggcagtagatgaaaaagtatatagcgtttgatattggcggtacgcaaattaagtatggcattatttcagaagcagggagagtattaaagcgtaaaacagttgcaacagaaattcacttaggcggagaacaaattattcaaaaactcattcttttatcaaaaaaattaatgaatgaacatactattgccggaattggtattagcactgcgggaattgtgacgggaggcgcggatcatattccgggatatagtactattcctattattgatagattgcaagagatattaaaagttccagtatcgattgacaatgatgtgaattgtgcagcgtttggagaaaagtggaatggtagtgtaagagagaaagagaactttattatgctcaccattggaacaggagttgggggagcaatttttatagatggagaattgtaccgaggacattcatttagtgctggtgaatgggggaatatgctaatagaaggaaaaacgtttgaagaggttgcttcgatttcaggattaattcggcttgtaagaaaatataaaggcaaaggcgagtggaatgggagaacaatttttgagttgtatgataaaggagatagagaagttgctcaagcagttgggattttctttaaacatttggcaatcggaattagtaatcttgcttatatttttaatccagaaacaattattattgggggaggaattaccgatagaggaaatgagtttttaaaagaagtaaaagaagaggtcagtaaatacttaaatcaagagatttataataattgtgagattgaacttgcacaaaacggtaattgtgcaggaatgattggtgctatttaccacttattacatcatcataagtaaattatatgaatgttttcatataactgagaatttatcctttttatcaataggtaaataatgctacaatataagagaagaatacaatattttccgatatggaaaatgctttgtagaaagggagaaacttcatgcctattattttagaaaaaggtcaaaagatcgatttaacgaaaggacaaccaaaagtagcaaaactacaggttggcttaggctgggatccaattgggcaatcaggtggatttctgtcttcattatttggaagtaaaccaaatatagattgtgatgcatctgttgttatgttagaaggagatcgttttttaaacaaaaatgatttagtttacttcggaaacaaactttctacttgtggtagtattattcattcaggagataatttaacaggtgaaggcgaaggtgacgatgaaacaatctttgtagaattacataaagtcccaagtcgtattaaccgtttagtattcgttgtaaatatttatgactgtgtaaacagacgtcaagactttggtatgattcgtaacgcttatattcgtattcaaaatcctcatacaggtgaggaattagcacgttataatttatcagaaaactatgctagtaaaacaactttaattgcaggagaaatgtatcgctacgaaaatgagtggaagttttcagcagttggagaaggcacgcaagataaaaacttaagtgagattgtatcacgttatcaataggataaactaaggaggaatttttaaatggcatctatttctttaaaaaagggacaaaaggtagatttaacaaaaacaaatccaggtttatcaaaggtacttgtagggcttggctgggatacaaatcgttatgatggacaagctgatttcgatttagatgttagtatctttttagtaggtgcgaacggtaaagtttcaggagcagaagatttcgttttctataataatcccaaaggtgcgaatggtgctgtagagcatttaggagataaccgaactggtgaaggcgaaggcgatgatgaagcgattaaaatcgatttaaaaaatgttcctgctcacatcgaacgtatttgtttcacaattacaatttatgatggagaaggccgcagccaaaactttggtcaagtttctaactcattcgtacgtattctcgatgaagaaaagaatgcagagttaattcgttacgatttaggagaagatttctctattgaaacagcggtagtagtaggtgaattataccgccatgcaggtgattggaagttcaatgcaatcggaagtggattccaaggtgggttagcgtctctatgtaataactttggtttagatgtagagtaatagatttaatttatatatccattggtgaaatgcatgtttactgatgggtatatttttaaagataaaaatatagaggtgaatataaatggctattcagttacaaaaaggacagaagattgatttaggtaagacgagtcctggtttaacaaaagcagtaattggtcttggatgggatattaaatcttatgatggcggagacgatttcgatttagatgcatctgcttttttattagatgcgaacgggaaatgtacgaaggaaactgattttatcttctataataatttaaagtctccttgtggatcagttttacatactggcgataacagaacaggtgaaggcgaaggcgacgatgagcaacttgttgtagatttgaaaaaggttccagcagacgttcataaaattgctattacagttacaatttatgatgcggaaggccgtaatcaaaactttggacaagtaggaaacgcattcgttcgtttagcgaatgaagagacgaacgaagaagttcttcgttttgatttaggggaagacttctctatcgaaacagcagttgtcttttgtgaattataccgtcataatggacagtggaagtttaatgcagtaggaagtggattccaaggtggtttaggtgcgcttgtaagagcgtatggcttggatgcatagaaaggaaacgatattcgtttcctttttttgacctttctataaatctagcaaagaataggggataaaggtaagatgagtattttgcaaggaatccttgatacgtatgctcagtttttcgacttggacatgtggattaaagtgttgcaagatccagtatcttggggattaattggtacacttgttgtacttgaagggttgttatctgctgataacgcacttgtgttagcggtaatggtaaaacaccttcctgaagagaaacgtaaaaaagcattattctatggacttattggagcttatatattccgctttattgcaattggaatcggaatgttcttaattaaattatggtgggtaaaacttcttggtgcactttaccttgcttggttatcagtaaaatactttattgataagcgtaaaggtgcaggtgaagaagaggaagctcatggtatgaaccaaaacagtattttcttcagaatgttcggtgtcttctggggaacagttgcaatggtcgaattaatggatatcgcattctctgtagatagtgtacttgctgcatttggtgtatctaatgaagtttggattttattattaggcggaatgctaggtattttaatgatgcgtggtattgccggtgtattcttgaaattattagagcgtattccagagcttgaaacgacagcatacattttaatcttaattattgcatcgaaaatgttactgtctttaatcgagattgagattagtcatacactattctttattattttagttgtagcatttggagcaacatttataattcactacatgaagaattctggacaagctaaagaagaagttgcagctactaaagaagataataaataattgaaatgggtttgctcgttttgcgagcgcccattttttataacaaaaaatagtttataatagaagaaggacttagaaaaaacgtaactgtttttggaggtgaactgttgtgttttcacgttttacacttcaaccatatgcattaaaagatgaatcagatttaaagcaatttgaaacgcttttagaaaaacgtccacaatatgaactgacagagaatgagatgaaatttagttatatagcatgtcgaatccttggcgttcctaatgatgtagatgaatattttaatgaactgtttgattatagtgaagcgaaaggaatcgaagttttacacgaacaaaatttaaacaaagtgattgattcggaaaagcttcgtcatattcaagaagtgttcggattacatcaagaagcaccaaatggtctgacagtaaataggttagttgcacacttatctgggaaacaacttttaccgaaagtagacaatcctgatttacagcattacatacatacgacgtttatttcactattgaaattatatgagaaacaacataatcagtcgttaaagacagaaggcttccgtcgtttcttaatcgacataattaaactaagcgaaaattatgtagcgaagtggtttactacgattaattataagaaacagatgccgcgtatcgtttggtatggtgatgcacaggaaagccgtatatatttcttatactttcttattatgctcggttgtgatgtgctttattatcacccagaaggaaaagatggatttgagaatgttgatgaagagggaaggacctttattgtgtctcatccaggccgtatttctcttgaaccatttccagatcgccgccgcgagcgtgtggcaacagtagcgtatcaagcttcaaaagaaattgagcaagtacttcaccacgataattcactgctgtacaagccgtggcaattccgttcctatacgcctgtagctcgtacactaaaaacaacatatgatgagctctttttaattacgaaagaaaaggcgtttgtacgcccgacattctttgttgaaaataaacatatttatatcccttctttatttgcgaaaatatcaggcgtttcaaagaatgataaagagtattttcaacgattaaaggctgttacatcatttgataacagtatactagttaatacattcccatttacgaaagagcaaaaagcaaacttccaatatcattatcgagatgcattagaccgtggggggaaattacatcctgatctaattatgaatagccattggtggccgcataagcgtttaccggaaggtttacaacatgggattgcagaagcgattatccatacgtgtgaaagtgaaatgtgcaaaccaattgcgaaagagacaaaacaagatgtagcgctatatgttttcgcgcaactttctcaaataccaccgaatattttagaacagcttgagaaatttgattattcacaagatgtgccgaaaattgttatatttaataatgagaagagtggagagttaactcgttctgatgctgttttattactatttttaaatcaaattggagtagatgtattccatttcaatccaacgggaagaaacgatattgaaccgtatattgaagcgggggcatttgattcccattggcttgaagaggttaatttcgatcttgagtttcatggttcatcagcctataaaaatttatcacaaacaataaaaggactatttcgtccatttttataaggaaagggagaataccatatgaataacccagtcgtactagatccgaaaacagaattaaatgagcaaacagcacaagatattcgcttgcaacttagacaagatgcggatgtacaacgtatttataatgcagtagatattaaagatcaattagaattaattgaacttggaaaagaaccttctatggaaatttcacgttttgctgatcaaattttacatacaatgtcattatcaaagatagaagattctggtgaattattaaaacagcttggtaaaattatggacagatttgatagcaaagactttgcggaagagaaaagtggtttcttctcacgtatgttcaaaaaagcggataaaatgattgaacaaatctttagcaagtatcaaacgatgggccgtgaaattgataaagtgtatgtggaaattacgaagtaccaagatgagatgaaaaaatcaattggtacgttagatggcttgtatgagcaaaacttaaaatattatttagacttagagaagtacgtagtagcaggagaaatgttattagagcgtttaaatacagagttagttccgatgtatgaagagcgtgtgcgtaataatgatcaattagcaggtattgaattagagtcgcttaaaaactcggttgaaattttagagcaacgtattgatgatttagaaaaagcgcgtatggttgcgctacttacagcaccacaaattcgtatgattcaacgtggtaataataaattaattggtaaaattaatacagcatttattacaacgattcctatttttaaaaatggtatcattcaagcggtaaatgcgaagcgtcaaaagcttgttgcagattctatggctgaactggatcgccgtacaaatgaattacttaagaaaaatgcacaaaatatcgcaacgcaaagtgtagaagtagcgagattatcaggttcttctagtattaagatggaaacacttgaggaaacttggaacattatttcaagaggtatgcaagaaacacaacaaattgaagaacaaaacaaacgtgagcgtgaagaaagccgcaaacgtatggctacattaacagagaatatcaaaaaagaattacaaggataaagtgaaactttaatcagtggggttttgttcatccccaccgattattagccttcacaattggacatttatgggcagttaatctaccacctaacttctttgctcaaactgaattttgaggtgggagttttactgcacggaaaatagtagggtaaatgaaaaggcaatgaggactattcctcattgccttttagtttctcttcactaatttaataatctcattcacaataagtggaatgatacttaataagagaacaaatccccaatctcgcatcgttaatgcatgtacaccgaatatatttgcaaggggcgggatggagatgatacaaacttgcataagaacaccgataagaagggagaagactaaatatttatttgtaaagatcccaatggaaaaaattgatttcgttcttgaacgcaagttaaatgaatgaacgagctgagaaaaactaagaacgacaaatgccatcgtttgagcgtgtaatagagcatcctcatcaatttgctctgggaaaagagggaataaatgtgtatctccagtatagaactttgctccggcgataaaggctattagcgtcaaaagcccaatgacaatcccattgaaaataaggaaaggaacgctaccactaaataagctttctttcgcatgtcgtggtttttccttcatcacatcaggatcttcaggatcaaccccaagtgataatgcaggcagggtatctgtaattaaatttacccacaaaatgtgaataggtcgtagtggtgttgcccagccgagtaaaatggctaaaaataaagtgataatttctccgaagttacaagagagtaggaagagaattgatttttttatgttacgataaatatttctaccttcttcaacggctttcacaatagatgagaaattatcatctgttaacacgacatctgctgccccttttgcaacgtctgttcctgtaatgcccatcgctacgccaacatcagcttgctttaaagatggtgcatcattgacaccatcaccagtcatagaaacgatatttcctttcgcgcgtaatgcctttacaattttcactttatgctctggagagactctagcgaatacatttaaatgattaattttgctagctagttctgtatcagaaatgttatctaattcagttccaatcataatttccgatatttcttcagcaatgccaagttcttcagcaatgccaagttctttggcaattgcaaaggcggtatctttatggtcaccggtaatcataactgtgcgaataccggcttttttacattctttaattgaatctttcacttcagttcgtggtggatcaatcataccgacaagaccaataaagataagattttcttcaagatgatttatatccatatcgtttgaattgtattgtttaaatgcgaatgaaagtactcttaaagcttcttgagacattgctccggcagattctaatatttgatttttatcagaatcagttaaaatctcgattttgccgtttttaaaaatatgggtacatcgaggtaagagcttatcgatagcgcctttcgtcatgctatagtagctttcatcgtatgtatgcacggttgacatcattttacgatctgaatcgaaaggtacttcgttaacacgttcatgtattttttctaaataatctttttgcatgttaaaagtggttccagcaacgagaagtgcaatttcagtcgggtctcccgtttgtgattcgttattataagacgcatcattacatagcaccatattttctaacaatagacgttgcgcatcattatttacatttaaactttctaagcgatcgtatgtgttatcactataaaagtgagtaacggtcattttattttgcgttaacgtacctgttttatctgaacaaataattgtgacagaaccgagggcttcaacagctggtagtttgcgaatgataacgttttgtttaatcatacgttgcacaccaattgcaagaacgatggaaacgatagctggcaagccttctggaatagctgcaacggctaaactaatagcagtcataaacatttctaacgtatcccggccttgtaaaaaaccgatgaggaacataatgatacaaatagctacagcgacaaagcctaaatattttccgacttgtgctaagcttttttgaagtggtgtcatatcatcgtctgcttcatgtaaaagggtagcaatcttaccaatttgtgagttcattccagtttcaacagcaacaccgacgcctcttccgtatgttacaagagtagacataaaggccatgtttttttgatcgccgagtggtacttgttcatcactttgcatggaagggtggtagattgcatctttatcaacagggacagattcaccagttagagcagattcttcaacttttaaatttgcggtttcaataaggcgtaaatcgcatgggatatatcgtccggcgtcgagcataacgatatcacctggaacgacgtgctcagatggaatttcttttagttcaccatgtctcttgacgatggctttaggtgttgccatcttttttagtgcctctaaagcttgttctgctttagattcttggacaacaccgataacagcatttaaaactacaacaagcgcgataatactggcatccgcccattcacctacaaaggcagaaataagggcagcaataataaggacatatacgaggacgtcattaaattgggcgaaaatacgctgccataaagtgcgtttttgttttgtagctaattcattagaaccgtattgctttaaacgttcacttacaatttcatctgttaaaccgtgttgttcgtttgtttctaggtcaattaatgtttgatctttcgtcttactgtaccaattgctcataagtaagcacctccagtaaaaacagttagcaatggtagtgttgctattatttgtgagtagtatgtatggagaaaaatctaaggtgaggttctacttctattgtacaatattttacagttggttgagggaaagagaagagttgtcatgaatttgttggaaataaaaaagagcctcatataagagaggcttttttactttttaattaatgtacctaattcttctgtaatagcttgcatttcactaatgctgaatgtttcacgtttcataacatgatcataaatgtcacgtaaatcttcgtacatttcttcgttaaaactagcagctctcatcgctccagcattaaccatacgtaatttttctttaatagcttcgaccatatattcaacgttttcttctgactttacggataaatccaccgaagtgtccccctttaaaataacataaggctatcttaacattttttatcattttcgttaatgaatcttttcaatcccattaaattagtagggatttcctttatatttaataattggttgtttatactataagtatatataaagaaatgcaccaagaagggaagaaacaaaagtatggttcaagtattgtttgtttgtcttgggaacatttgccgttctccgatggcagaagcgatttttcgaaatcttgtcgtaaaagagggacttgaagagaaaattgtcattgattctgcaggaactggagattggcatgttggccatccgccacataaaggaacacaaaaaattttaaaagaaaatgcagtcacttttgaaggaattaaagcaaggcaagtagaaaaagaagacttaacaaagtttgattatattattgccatggacaacaagaatatagcagatttaaaaagtttaggtaaaactggaggctatattggtaggctgtccgactttgttccagacggtggctggacagacgttcctgacccttactatacagggaatttccaagaagtatatgaccttgtaacagaagggtgtgcaaagctattagctttcattcgaaatgaacaaggaatatgaggaagcttagaaagaaatactttctaacataagaaatgaaagggtgaaggaatatggcaaagaaaaataatattgctcgaaacattgcgattggtgtagcggcaggtgtagctgtatccatgttaaagaaagaaaaccgtgaaaaagtaaaaaatacagcagaaaaagcaaaaacaaagatgattgaaattggtgaaaatgcaaagattaaagaaaaagtgcaaactgttacagataaaggacgcgaacttgctgatttcaatgtggtaaaagcgaaagtagcagaaattaaaaaattaacgccatctgttgtagagacgttaaaagaaacgaaagaaatttttagtaagaaaaaagttgagccagaagaaaagccagaaacgattgaaattcaagctgtatctccaaaggtagatgagctgaaagcagaagaagagccagtagttgctgaagatggtggtatgaaagaagcgcgtgaattatttatgaaagactcaaatgcagtggaaaaaaaaactgaagcgtacattgagttaaagcaagataaagaagagaagaaaagcgtttaaacatatatgagaaaaattttagaaaaggtgagaagaaatcgtacttattcgtttggtaaagatttatatgaccggacgatgcgcgatgatgtagcgggcttggcagcacagctcgcttatttcttcttgcttgcaatttttcctgggctcgttttcttaattacgcttcttggatttattcccattcaaacagaggatgtgcttagtttattagaggtttatgtaccagatgatgcaatgaacttaattgaggtaaatgtagataaagttgtaaaccagcaaaatggtggtttattatcatttggtttattatccatgttatggtttgcctcaaatggtgttaatgcggttatgaatgcttttaaccgcgcttatgacgtgaaggaaacacgttcttttattacaacaagagcgttatcaattgtgtttacattagctattatttttatgattgtctttgcattaattgttccggtattcggacaagttattggagcagcagtgtttaaagcactcggtttatcagatagtttttctttcgtgtggagcattacacgattagtagcgagtttcttcgtgctatttgctttgtttagtttcttatatacatttgccccagatcgaaagttaaaaagaagagaagttatttcaggggcgttatttgctactgtaggatggattgtggtatcgtactcatttgcttattatgtagataagtttgcgaattacgccaatacatatggtggtctcggtggtatcattattttaatgttatggttttacttaactggatgggtaattttacttggcggtgaaattaatggtttactccaccattatagaaccggtgacaataattcccgtaatgaataatgagctcttgttccataataaaaaggaacaggggggatatttcatgagtaataataaaaagaaccataataataaaagtaataataaacaaaagagcagttcgcatccaaagcataaaacgagtagcagtgcgaacggtcataatagctatcattaaaaaaaacgggtcctctatgagggacccgttttatttgctgccttttaataatcgtaagccattcaaaatgacaagaatcgtacttccttcatggccaataacaccgaatggaagagctaaaaattgcaagaagtttgaacaaattagcatggcaataacggctagcgaaaagattacgttttgcttcacaatacggttcattcgttttgataaacgaattgcttgggaaagacgagatagttcgttcttcatcagtacaacatccgcagtttctaaagctacatctgttccttctcccattgcgacaccaatgctagcagtagctagtgcaggtgcatcatttataccgtctccgaccattgctactgtaccgtatttttcttttaactttttaatcgtttcaacttttgtttctggtaaacatgatgcgtaatattcctttatattactttcagaggcaattgcttttgccgtttcttcattatctccagtaatcataattgcttcgacaccaatgctttgtaattcacgaatagcagctattgtttcttggcgaagcgtatcttttaaagcgataagtccaagaatgcctccctcatcactaatataaacgacagttttaccttccttttcaagtgaggcagaaataccattatgaaatgtttttgtttcttcaccgataaaatcagctttacctattttataagcgttgttttcgaatattccttttagcccaaaaccagttacatcttcaaccttttcaggtttttttaatgtaatgtcgtacgcatgttgtgcatatttaacaatagatgcagccaaaggatgtgtagagtgactttcaatggatgctgtaatagaaagtacttctttttctgtcatattttctcgaacatatacatctgttacggtaggttttccttctgttaatgttcctgttttatcaaaggcgattgcttttactgaagcgaggcgttctaaatgtatgccacctttaaagagaattccatttcttgctccgttagaaattgcagataacgttgctggtgtaatggcagcaacgagtgcacaaggagatgcgactacaagtaagatcatagcgcgataaaacgtttcattccagctccagtcaagtaagaaatgaggaacgaacatcataagcgcaacaacgagtagtacaccttttacgtatgttccttcaaacttttcgatgaatagttgtgatggtgatttttcactttgtgcactttggacgagacggataattttttggaataatgtttgatcgcttggcttcgtaattttaacttcgatagcaccacgtaaatttacagtacctgcaaatacttcatcgccatgtcttttctcatttggaataggttctcccgtgattgctgcttcatcaatatttgtttcaccgttatgaatcgtaccgtcagcgggaacacgttcacctggtttaattaaaataatgtcgttaatttgtaactctccaacaggaacacgttcctccgttccgttggaaatgcgtaatgcttcttcgggttgtaagtcaagaagagcggaaatttctttttggctcttacttaatgtataagattccatagcaccgctgagcgcaaagataaagattaagatagccccttctgcccagtagccaataattgcagcaccaatagctgcaaagagcattagcatttcaacatttagctctttttcttcaatcgtatcttcaatgccttctttcgcttttgcatatccaccaactatataagcaaggatatagcaagtaatacctacattcattacatcgttttttgtgaataaccagccaactaaaataaaaataccagatgctactgcaaatacaagttcataatgtttttttaatgtgtcccataaagagggatgagaaattgtttcttttgactgtaacgtttttacttctgagttcattactacccgctccttccgcattcttattgagaaaaataatcaaaatcgaaacccctataaaacgacgaaagctgccatccataatggatagcagcatttctgttgaatctgtttttaatagttcttatgttgtaattattctatagtatatcatatgtttttatgagatggtacggttttgtttcaagtataaacggaaaacttgtgttttcgcaactcctctggtatatatgaatattgttcataaaaagatcggaaaggaagacaacaagtgaagacagagaaaatttttacccatccgattggcgtatttattgctgcaatagtagcaacttttttatggggaagcgcatttccttttattaaattaagttatgttgaacttggaattcaaccacaagaagttggagagcaaatattatttgccggttatcgtttctttttatctggagtcatgctcttattattctttaaagtgttaggaaaagatatgagcttcaaaaaaggaacagggaaacagttaatacaaattggtttattccaaacgtttcttcaatatatctgtttttacattggaatgagttatagttcaggaattgaaggagctatcatttcaggaacatcatcattctttcaaattttactcgcccattttttatataaagatgatgctctcaatatgagaaaattaattggggtatctattggtttttgtggcgtcattttagtaaatgtgccgagtgatggtagcttatcatttcattttgggatcggaagcttattacttcttagtgcagcatgctgtattcatatggaaacatattagcaaaagaaggtagtaaaacattagatgttggctatatgacagcataccaaatgatttttggttctataggattattatgtataggggctttacaagttggagtcatgccatttacatttagtctacatgcactacttatgctaatttatttatctttcttatctgcagctggtttttgcatttggaatacaattatgaagtataacaaggttggaaaagtatctatgtatatgttctttatacccgtatttggtgtgttattatcgagcatgattttaggtgaagcaattcattcatttgtgctactcggtttagcatgtgtagccgcgggaatcattgtggtaaataggacaccagctaagcaaaaaatggagcaagaaaaacaagtagcatagagagcagaaaagcgattacaatggaagaacagtactgttcttcttttttcatagaaaaaggataatagactaagtgtaacgaaaaaagatacaaaaagcatttattgaggagaaaatattatgaatctactttacgtggtgttaattgggcaaatatttcttttttttattggtgcaatttatgcaatggggcagacaaaaagaacgaaagataatatgccgttacctttagcaattcgtcttattcttagtttttctttaacaggtagtgcaatttgcatatggttacaagatccatctgtagagtatagtacgtgggttgcacttggtatgactttatcgactgtgggagatttgtttatggctgggctgattccaattggtcatcgattaattggagggatggttactttcgctcttgctcattgtttttatgtaaaagcatttttgcaaacaggaatttcatggaatggtttttggattggcttactcgtatatgggctctttctaattgtaggatggttcttctttatccgaaatgataaacaggataagttgtttacgataggagctctaatttacggattgtgggttggaggaatggcttgctttgcattcgccttatattatgaaaatacagggatatggtggataccagcgtttggtggcttactgtttgtaatttctgatttcattattggcgtgacagatatcggagggcgtaaattgaagtatgagccactttggatttggcttacatatgtagctgctcaaatgtgtattgtatatgtgggattataaaaagatactctcaaaaatagtggatagactattttgagagtatcttttttgcttgttaatttgatcagtatttttattgtgaaatttctaatattataattttacaattcagaattttgtagaaaatcaccggtcgtattatttataataaaagtaaaaagatgatgagttggtgaaatgatgcaaaagaaaaaacgttggcgtgaattctttggaactattgcaattgcatgtttattggtgtttttggcgaaaatttttgtgttttttccgacgactgtaaaaggagcatctatgaggccaacgttgcaagatggagatagggtgattgttaataagttagcaaaacaatttgaaagctatgggagagaagatattattgttgtgaaaacagataatttttatgtcaaaagagtgattggattgcctggagatataattgagatgagaaatgatcaattatatgtaaattctgaaatgaaagatgaagagtatttggatagtaataaaaaacaagcagaaaaaaaacttatgaatttaacagaggactttggaccgattacagttcctaaaaataagatttttgttatgggagataatcgcttaataagtaaagatagtagaaatggtttaggttttattgatagagaagatgtgttaggaaagttagcaggcatttattatccgtttgaacatatgaaaataataaagtaaaaaaaccaagcaaattttagtttgcttggtttttttgttaaacagtaggagattcgtttgatacaaagatatcttcatgtttctttgtagtacttaaaacaaatttatgttgtagtaattgtagtttaaataacgccaaaggatcatgatatgtttctggattgcttcttagcgtcgctaatgtttgctcgtcttcctgtatctcaagttgagctgcatctacattttgtttcaatatattaagtggatctttgaagaacatcatgatatcacgttctaatgcaccttcaaatacttcaaattgaaggaagaattgtttggaaattgtgtgagcaatttctgtatagtcttctgtttcaatatattgtttatatttgttggcgagcatagattggtttttttgcatattaccaaataattttccggcactttttaagaaaaactgtgtcggtgtaaagcgtaataaaatattgatgttcgttactgtaattcgatttgtcattcgtgcaacatctcgattccaatcatctaataatttgaaatcgcaaggaagtttcatacgttcttctttatataatttattaaacgtttcactcatttcatctaaataagcttgagcttgaataaattcattatgtgctgtttcaatccattcttgaatagacccagtaaatttaggaagaagtacctgttgtacatgcttttgaacacgttcattcattgcagcatttaattcttcatgaactagtttgaaatcactatcttcttgaacaagatcagagcaactctgtaataattcaggaatttgagaatgtatatctcgtgtaatttcttctttcgttaaaagataggattcggtaatagagcgaattttatctttttcaagagcagtaaggttattaataaatccagtaagtttcactgagatgtgtttattccagcgtacggattttactaatgtattttctaattccacacgttcatttatgagataagcaattgtcttttgtgtaaaccatattagcttttctatacgttctttttctatatcgcgttttgcaagattagagagaatagattctgttacatctccaagttgctggctactctcttgcgaaggagagtatgggaagaattgtgcatctggaaaatgtactttaagtttactaattagtttttcattagtagtcgtattatttgtgtgtaatacgaagtgaatttgtaagtttggtacttgttcacgtaaataaattaatgtatcaatttctttactatgcaatggtgaagaagaatttaatacgtaaacaagactatctgctgcttgtaagtattcaaagtatgcattgtttttatccaattgctcttgaatggatggtgtaagaagaaatgtaaacttattttttcttaaaaacctacttggtagcttaatttctatacattttttctcaagttctgactgagcagatgtagccgttatttgatggaattcatcaaggttagggatatttcgtatatctaactcggtaaattctgttatttcagtttgactagcgtctttaaatagaataggagttgttaaagtttcagttaagatgttctctcccaatattgaattaacaaatgatgttttatcatggtcactagttccagctattagtagtggtgtgacatttaaatcacatagttcatggactagtagcgtaaattgatgacttaaatctacatcatttttctcagcccatacagcgattgtttcgaataaatgagaaactgtttccatatttacatctgcttcagctgatgtattagaaagtaaggatccagcactttttacgagtaatgattctaaagttgtaggtgagacttcattccatgctaacactgctgcagagacaactagagaatcttttgctttcgttaaactaaaccaatttgttaataaatttggtacaagtccgtttaattcatgcataaaatgatttccggtaattaatgcaaagtatgtttcttgatagcgagtagaaatttcattccaatcgtcattattgtctgtttcaatatgcaagaataaatgattaatactttgaatccaaggaaggtataaggattcatgttgatagctattccaaagagcaataacaagctctttaaattgagcttgatcaacagcatatagagcttttaaagactcatagaaatattcaggcttaatattttttgtaaatcctttgtttatgtaatttattaacgtatcaaaccagtgtaaagattgtgttcgaataccttcttgaacagctagttcgatagcgttgttccaatcttcttgtttttcatagaaagaacgtgcaattgcagtaatatttggataatccggttggaatgcaacagcttcactaatcgtcttaaaagcgagtcctaaacgatcttgttcgatataaagagaaagaagttgtaaggaaacctccatcgtaagagttgtatcttccgtttgaatagattgataaatttcttctgcctttggtaagaatcctagttcaaaataagcatctgcaatattttttgtcgcccaaagtgcaagagcattatttactttttcccatttaaatatagctgcttcaaaatctttattttgataataaaattcaccttgagcaaatcgaatattagaaatgttggagaattcatttttagattcatttatatatgcttcaccgagtacttccgatgcaggagtagaagtttcttctgttaaaaatgttttatagtaaactttttgaataaattgattttcaatggtcatgttcgttcccccctgtataatttagaaaaatgatgtcgtatgtaaaagggtgtatgttcttttaataggtagaagttgcattatatagaccaaactatgtttttgctagatatatcatttttcttgagagttaaaccgttgcgaaaagtaactttcctttattgtaacaaaaaaacacgcatatgaatttttattttttatcgggttatttgcgggcagtaagaatctaatctcaaaattgttgaatgtaagtaagttatgtgggagtcgggatgtctatagaagcaagattggcataggttaataattagtagaggataaacaaaactcccactgattaaagtttcactttatctctgttaaaggaaagaatagaagtagagttcattataaaaacaatgtatagtgaatatgtataccatgtttgccttaaagatagaaagggtacaatgtggaataacgatcgtgcataggatgtgtcttccgaatggaacaacatattggcgagttaatcgcgcattatggctattttggaattgttatagctttggctggtgggattgtcggattaccgataccagacgagtttttattgacctttgttggttataatgtttcaaaaggagttatgtcaggaactgctgcttttttaagtgggatggctggtgcgatgttagggatcacgttaagctacatattaggtttaaaacttgggctccctgttttaaagaaatatgggccgaaaattagaattaaagaacatcacattgaaaaaacacatattttatttgaaaaatatgggccatttcttttaatgattggttattttataccgggagtacgtcatttaacggcatattttgctggagtatcaaatttgacattttggcgtttttgtttgtacgcttatggtggtgcgcttatttggataagtgtttttattgggcttggctggaagttaggcgagaagtggcgcttcgttgagtatagtttacatcattatggaatatggattttattaatttcagcagttgttacatgtgttgtatggttgtacataaagaaaaagaaaaaccgctaatagcggttttttttagctgaaagcaataaataatacaccagctgtaataaagactacaccaacaccggtcataaagtttaacttttcaccgaggataatcatagcgagaatgatagaaaatacgacgcttaatttatcgacaggagctacttgtgaaacctttcctgttttgagggcaagaaaataaaatagccatgacgaagcacctgcaaccccacttaatgtgataaatagcagtgcttttttatttagcagtacgtcgccgatattttgaaatttaccttgtatgataataacgcctatcataaataatgccataataatagatcgaattgttgttgcaacgtttgcatcgattccgtctaaaccaaactttccaaaaatagatacaagggcagcagcaattgctgataatagtgcaaataagagccacgaactcatagtaaaattcctccaatcttacagtattatacatgaaaatgattctcatgtataaagttgaagcaattgagctttataggaagtgcgacttcaacttaacttcttgctccacctgaattttaaggtgggagttttactgcctgcaaatagtgggctaaataacgaaataatccccaccttatatttttaataaggtggggattattatactactctgcaatttcctcatataaaaagtacgttacattataaatatgttctacttcatcgtctgtcataaacagtaattcgtcacgctcaatcccttttttcttttcaataaactcaatcatgtttttgcgttcttctctcttcatcaattttatttctcctctcaatctgttttaatacagtttatttaagttactgctattatataacagaatctttagaaagttccacctattttattgttttttcaaaaagaacttttcgacaaaacaagcccacctaaggaggggcttgttttattttatagtcgtaaaaactcaggctccgtcgtaccggcaccatcaatgtaataaattgtgtcgggattgatttttatcaatacgtaattagggtcttcaggaccgagtaaccaacgttttaagctattattccaaaacttgttttttaatgttgagtcttcctcgattgaagctaacccttcaacttcaatataatcttcatctaatttttttccttcacgtccaagtagtacatgtacatttggatttttttcgatatctgttatcttttttgattttcgatctgttgcaacatatagtacaaaatcttcatggaaaaacatcataaaggcgctatgaggtttctcgttacgtactgtagataatacaccagtacgttgtccttgaataatagttgcaattttctcttttaagtgcatattctttacctcttttcctaatttatattttctctgtttaaacaagataatttaaatatctttcatactgttttctttaagtcgattttttaaacgtaatcgtgatgaaatcggacaagttaggagaagaataataataatattgaggagaaatacatacgatggaaggatgaaaagcatgtttaataaaatatttcttatagtagcacttataggtgtaccactatctgtacttggcaaaacacttcattggccagaaacaattatgttcgctgtgtattgtattacgattatcgcattagctggttttatggggagagcaacagagagtttagcaattgtttctggtcctagaataggcggattattaaatgctactttcggtaatgctgttgaacttatcatttcaatttttgcacttcaagcagggttaattgaagtggtgttagcttctttaaccggttctgtacttggaaatttattattggtaggagggttatctttctttgttggaggtcttaaatacaaaagacaaagttttaatgtatatgatgcaaggcataattcagctttattaatatttgctgttgttgtggcctttgttattccagagatcttttcaatgaagatggacgctggcaagacgtatcaattaagtataggtgtttctattattatgattatcatgtaccttgctgcattactatttaagttagttacgcaccgtggtgtatatcaacataaaagtgacgaagtagcgcatgaagaagagcaagagtggtcaaaagggaaggcgctccttattttagcgatagcaacactggcagtagcttatgtgtcagaggcactcgtacatacttttgaaactgttgcaaagtcatttggttggtcagagttatttataggggttattatcgttgcgattgttgggaatgcagcggaacatgcgtctgcaattattatggcttataaaaataaagtaaatattgcagtcgaaattgcaataggctctacattacaaatcgccatgtttgttgctcctgtattagtattgctatctatgttcttcgcgcaaaggatgcctttagtatttactataccagaacttgtgtctatgattacagccgttttcttaacgattgcgatttcaaatgatggagatacaaactggtttgaaggtggcactttactagcggcgtatgtcattatgggaattggtttttatttattatgaaaaataggcataacaattgcgctcagagaaaacaataaacgaagtagtatatatacctacataggaaggagccagacaggtgaaacgagtatacagcatatgtctttcaactatggtctcgtttattttattatttcctaacatgagttttgcaaagacaacagtaggaacaaaaatgccttcatctgttttaaatatttcaaaagacaatacatttccaaatgatgcgcaagatttgccacgtttacaaccaagtaaatttgctcaagagctattgaaaacggctaatattaaaattgaaaatccagacttaattcggatgtttaatgaaacgacaatttcaaatgcgccgcttgcagtagggtatcgggcaaaaatttatttaggtcaatgggctttacattatgaatcagtagacacatcgattaattgggaatataaacaagtgaatcgaaatgtgtatgataatcgcggaggagaccgtttatatccacttcgctataagcaagaaacacaaaagacggttgaaggcgatttaacagcagatatgaaagatgctgcagatgtgaaaaaaatgatgcttctcaaagcacttgaaaaagtacaattgccgctttcatttaaaacgactattggttatggtacagggcatgagcgtgtgtataatattagtccgagtcaacttggatatttatatgcttatacaccagcagtaaatgaaaaaggaaaagtaacatttggagaagtataccttgtattaaaaggaaatcaaaaaaggcttgttgtaaaaaatattacttctcaaggaatcggtgctgctatcccaattcatgattatttgtattttaaattcatttcttcttcccactcgcaataacatgaaaaaacgtcagcttataagctgacgtttttttataatgtaatatttgctgtttttgataagaaatcttctgtcggatagtagctgttttttacaagaacatttggtccaagacattttactgcaggacagtgacagcttaatgattttgctgtttttgaagcgctccatttttcatacgcttcttgtaatgtgtttgtttgtatgtttcctagaagtggaacatcaccaaaatcagtaacgataatattgccatcaaaaatatttacatttaagcgtgaacgaccatctggatcgttacgaacagttacatttttgctctcttgtaactttttaaatgtggcaatgtctcgctcgtcatcgctacaagcatagaaaggtaaagttccaaataacatccatacattttcatcgcgaatttctagtaaatgctcaatcgcatcacgaatttcagcttttgttaaaatctctagattactcgcgaagtcacttggatacattggatgaacttcatgacgtttacagcccatctcttcgacgatttggcggtgaatatgttcaatatgtggtagagttcttttgtttagcattgtttcggcagatacaagtacacctgcatctgatagagccttactatttgtaatcattctttcgaataattttgcacgttgttcgtaagtaggtttacgctccatcattgcaaatccgccttcaacgaagtcatcaattgttccccagttatgagagatatgcaatacgtctaaataaggaataatctgttcgtaacgtgctaaatctatagttaagttagagttgatttgagtgcgaacgcctcgttcatgggcatattttaagagtggtgttacatagttgtcgacggatttttttgaaagcataggttcgccgccagtaatacttaaagaacgtaaatgaggaatctcatctaatcgttttaataaaagatccatcggaagcggattcgggtctttcggctgtaacgtgtaaccaacagcgcaatgctcacagcgcatattgcataacgtcgtcgttgtaaactcaacatttgttaatagtagtttgccgtactcttcaaggtccatatacgcttcccatggatcgtaagaaggagtaatcggcttcattttttgtgatatcatcatatgaaatactcctttgactattgaaataacaatttgtccattctctataatagaagaatatgtgctttttataaagtgaaactttttagcatgaaaagagagagggcttacattatagtggatgactgtgacaaaattgatgaaatttcatgcccatagcaatcgtttttgcggtataataaaagcaactcgaattaaaaggagagtgccttcatgggaaaagcaattcaagataaagatacacaattagtatatttaaaagaacgtttaaatatgttcattgaagtaattgatacaattgaacccgaagaagtagaattagaagatgtagatcgtcttcttgcaatgttagatgaattagaattaaaatgtgagcaatttaaaaaagacgaataatatattaaaaaggctaccaattccaatttggtagcctttttctgttcgggtaatagaaggacgatagaaaaagaggtataatcaagttgtgaaaaatttcatttatgctctaatagcgtgaaataaatagctaaagagcataacaattgaattttcagctcataacgttttggtagcgttcacaattgagggggaagtaacaatggaaaagcttcaagaaagcatgtatcaactaattgttgaaacgtcaacgaacttaccgaaagatgttcgtcgtgcgattcaacaagcgaaagagcgagaaaatgcagggactcgttctgcgatggcacttggcacaattacaaataatattaaaatggctgatgataacatctcgccgatttgccaagatacagggatgccaacgtttaaaatttatacaccagttggtgtgaatcaattaaagttgaaggaagctatctataatgcgcttgagcgggcgacaaaagatggtaaacttcgtcccaattctgttgattctctttttggagataatagtggaaataatttaggaccaggtacgccggtgattaagtttgaacaatgggaaaaagattatattgatgcacgtttaatcctaaaaggtggtggctgtgagaataaaaatattcaatatagcttaccgtgtgaactagaaggacttggacgagctggccgtgatttagaagggattcgtaaatgccttcttcatgcagtatatcaagcacaagggcaaggatgtagcgctggtgtaattggtgttggtatcgggggagaccgcacatcaggttatgaattagcaaaaaatcaattattccgtacattagatgatgtcaatccagtaccagagttacaacatcttgaagagtacgtattagaaaatgcgaacaagcttggcattggtacgatgggatttggcggagaaacaactttacttggttgtaaaattggcgtctataatcgtttgccagctagtttctatgtatctgttgcgtataattgctgggcatatcgtcgccttggtgtgaaaatccatcctgaaacaggagacattatggattggctatatcaagaaggggaagatacacttcagcatgaagtacaagaaaaaacagagcaacgtgagattgtattagaagcaccaattacagaagagcaaattcgtgaacttcgcgttggtgatgttgtaacaattaatggcatgatgtatacaggtcgtgacgcaatccataagcatttaatggataatgattgtccagtagatttaaatggacaaattatttaccactgtggtccagttgttgtgaaagatgacaatgacaattggcaaattaaagcggcaggtccaacgacaagtattcgtgaagaaccgtaccaaggcgatattatgaagaaattcggtattcgcgctgtcattggaaaaggcggtatgggtgcgaaaacattagcggctttagaagaacatggcggtgtatatttaaacgcaatcggtggtgcagcgcaatattatgctgaatgtattaaagaagtgaaagatgttgatttcttacaatttggtattccagaagcaatgtggcatttacgtatcgacggttttaaagcagttgtaacgatggactctcatggtaatagcttacatgcagatgttgataaaacatcacttgaaaaattagctagctttaaagagccagtatttaagtaaataaaaaatgcatctcgaatgattcgagatgcatttttttggtatatatagaaaaacatgttcagcatgaaagaatgcgttgcaacagaaactacaagtacgattatatatggaaaggagactatttatgaaatataaatggttatatatcggtctcattttttcaattatgatggcacttgttccagtttcagcactggcttatacaaatactccacataactggggaatcccgcgtcctaaaaatgaaacagtaccagatgcaggaaagttatatacagatttactacaaaaaaatggcgggttttatttaggagatacgaagaaaaaagatatttatttaacatttgataatggatatgagaatggatacacagggaaaatattagatgtattaaaagagaaaaaagtaccagcaactttctttgtaacggggcattacattaaaacacaaaaagatttattgttaagaatgaaggatgaaggacacattattggaaaccattcttggagtcatcctgattttacagcggtaaatgatgagaaacttcgtgaagaattaacgagtgtaacggaagaaattaaaaaagtaactgggcaaaaagaagtgaaatatgtacgtcctccgcgcggtgtatttagtgaaagaacgttagctcttacgaaagaaatgggctattataatgtattttggtcacttgcatttttggattggaaagtggatcagcaaagaggatggcaatatgcgcataataatgttatgacgatgattcatccaggatctattttattacttcatgcaatatcaaaagataatgcagaagcacttgcaaaaatcattgatgatttgcgcgagaaagggtatcattttaaaagtctagatgacttagtaaaaggcaatcaaccgtaagcatgtatgcttacggttttctcatgctataatgatgtgtaaaaaggatggggaaacgtatgtggagcgagcatgttacgttagagtatccgtatcattttgaagaagtattaaaacgtttatcttttgatcctcttaacgtcattcaattagatgagaaagttatttatatcccgctttgtatcgacgaggaacaggttgttgttcgcttacaagggattggtactgttcaaaatccacagttttggatttctagtcagacaggagatccagagaaagtcatgaaacgaatgagagccatttttcattggaatgaaccgtttcaagatatacaaaatcattttttaaacacatcattacgtccactatttgaaacatatgcttatactccaattattttagaatttgattattttgcttgtctgcttcgctgtatcattcaccaacaaataaatttgaaatttgctactgtgttaacagaacaatttgtgaaacggtatggaacagagaagaacggtgtattctttttccccactccggaaatagtagcaaatatttcaatagaagaattgagagagcagaagtttagtcagcgaaaggctgaatatatagtaggattaggtcgaagtattgtcagtggtacattaaatttagcgagtatagaaaatgggacggaagaagacatttcagcacaattgttgccaattaggggaattggtgcatggacagtgcaaaactttttaatgtttgggcttggacggaaaaatatgttcccgaaagcggacattgggattcagcgtgcagtgcaaggtatatttcaattagatgataaacctgatgatgcatttttagaaaaattgaaacaagagtgtgaaccatactgcagttatgcagcgttatatttatggaaaagtatagagtagaggtgtaataatgatacaaaagcaacatgagagtaagttggaagttggtcaaacgtttcctgtgacaattaaacgtcttgggattaacggagaaggcgttggttattttaagagacaagttgttttcattccaggggcattaccaggagaagaagttgttgcagaaacaacgaaaattcagcgtggcttcgctgaagcgaaagtgaaaaaagttcgtaaagcttcaccgcatcgtgtgaaagcaccgtgtccagtatatgaggagtgtggcggttgtcagctgcaacatttagattataaagaacaattgaatcaaaagcgtgatatcgttgtacaagcatttgagaagtacatgaaaaatagtatggaagagaaaattcgtccaacgcttggcatggaaaatccatggcattatcgtaataagagtcaattacaagtggggcgtaaagacgaaaaggttattacagggctatataaacaaaactcacatcagttaattgatatcgctcactgtatgattcaacataaagcaacgaatgaagcgacaaaagttgtaagacgtattttagaaaaattaaatgtttctatttacaatgagaaaaaacaaaaaggtttagtacgcacaattgtaacacgtactgcagttcaaacaggtgaagtacaagttacacttattacaacaaaagaagaattaccaaataaagaacaatttattgcagaagtacaaaaacagatgccagcggttaaatcaattatgcaaaatgtaaactggcgtaaaacatctgttatttttggcgacaaaacatttaaattagctggaaaagaagtaattcaagaaacacttggtgatttatcatttgaattatcagcacgtgcgttcttccagttgaatccagagcaaaccgttgttttatataatgaagcaaaaaaagccgctgcgttaacaggcgatgagaaaattgtagatgcgtattgtggcgttggtacaatcggtctttggcttgcaaatgatgcagcggaagtacgtggtatggatgtaattccagaagcgattgcagatgcaagaaaaaatgcgaagcgtcacggatttacaaatacgaaatatgaagcaggtaaagctgaacaatggttaccgaaatgggtaaaagaaggatggcgtccagatgtaattgttgtcgatccaccacgtacaggttgcgatgataaattactggaaacaattttaaaggtgaagccgaaacaagttgtgtatgtgtcttgtaatccttcttcattagcgcgtgatgtacaagcattaatgaagagctatgaagtggagtatgtgcaaccagttgatatgttcccgcatacagctcacgtagaaaatgtagtgaagcttgttagaaagtaaagtttattaatattccctcatggtatgagggaatattttctatgaaggagaatattatgcataattataaattaacaattcagtacgatggcgcacgttttaaaggatggcaacgtctcggtaataacgataatacaattcaaggaaaaatcgaaagtgtcatatctgaaatggtcggaaaagaaattgaaattattggttgtagtagaacagacgctggtgtacatgctttgaatcaagttgctaactttcaaagtgatgagaagttagtggaacataaagtgaaaaaatatttaaatcaatatttacctaatgatattagcattacgaatgtggaagaagtacatgatcgtttccatgctcgttacaattctaaagcaaaaacatatctgtataaaatttggaatgaagagcatacaaatccatttatgcgtaaatacagcatgcatgtgaataaaaaattaaatgtgaaaagcatgaaagcagctgcgaaacatttagttggttcacatgactttactgctttttcaaatgcgaaatcaaagaaaaaatctatggttcgagaagtatatacacttgatgtgatggaagaggcagggtttgtacaaattagagtaagtggtaacggcttccttcataatatggtaagaaaaattgtcggggcattaattgaagttggattaggacaattagacgctgaagcaattccaaacattttagaggaaaagcagcgcaatcaaattaattgtcttgctgaggcaagtgggttgtatttagagaatgttgagttttaatggcaaataaaaaaatcgggctaagtagctcgattttttttgtattacgaagatttctcgttttttatacgtagcttcaaattccaaaaagcagcaagcataatagctgcaaaggagccactaattgttgctaatagctttgcataaggataggcgtttatatcaattagtaacatcatacatacaatggtagggaagaaggctaagtattgtaataactttaatttgttatcattactcatatatatcgctcctttctagtatgttatatgtttattgtagcatattttaccaagtgtttatttgtatgttaaagcagatttatgctgcattaacaagcaataaaagtcgaattgattagggctagcaatccactcatccaagtttcatttcatatgtgtaaatgcagttttttaattcgatattgtaagttttgtctacttaatcctaaaaattttgcagcttgtgagatattcccgtgatactcttttagaatttgattgatgtagtttttttccatttcttctattgtgtgctttaacgttttaggcgtatcagtatcgttattagttaagaaaggttgcatattgaattctttttttattcgttcgcgaaagcgagtgggaagatgaaacgctgtaatgatgttttcatcttcaactaaattcattgaaccttcaatgatatgttccaattctcttacgtttccaggccaatcatatgcatataaaaactctcttacatgcacatctacatctgttacactaagtccgaattgaatattgtatttttcgataaagtgctgaacaagagccggaatatcttcttttcgttcacgtaaaggcggaagacataaagtaacgacgcttaatcgataatataagtcttctcgtaatcgattgtgtgtaatagcttcaagaggatcttcattaatagttgctataatacgaacgtcaatttctttttcttgtgtgcctccgattcttcttattgttttttcttgtatagctcgcagtaacttcgcttgaagtgctggacttaatgaattaatctcatctaataacaaagttcctccgttcgcttcttcgaataagcctgatttatctattgctcctgtaaaggcacctcgatttgtgccaaatagtaggctttccattaaggtatcaggtatagcggcacagttttgtgaaataaagggttttgttgaacgctgactttcattatggatgctttgtgcaaatagttctttaccagtgcctgtttctcctactagaagtatggaggaagatgtacgaattactctttttccttctgtaatgattgattgaatggctttagaatcaccaattatgtgatcaaaggtaaatttggtgctttgttttcgagaaggacccatttttatcgtctgctttaagtgactaatttcttttgatatttcaatagcgcctttaatttttccattttctattatagggaaagtatcgttaatcgttgtaatttcttgtcctttattgttaaaatacgtttgttttatatttttgtttgtttttcctaattttaatgcctctataagagtactatttttattttcttcaaatgcaaatacttctaaaggacttttatataatacatctgagcgttccattgattcaatttccatcattttgcggttgtagataatcgttttactttcctcattaataatatgaatcccgatatcgagctcattgagtaaagtttcatatagcatattcatttcaacgatctgttttaaattaatttcttctgtacgcatagattatcttctcctcatttcaccctatgaagactgactttttataattttattaaaattcttataaaatcgcaaaatttttttgctatttttctcttaaaacttttcaaatgatagaaaaattttgcggttgtgcacacttttttgtgtgaaactctcatttaatatatgaatcagagacttggtacgtattttgcataaataatattcgaaatctctagaggggagaatatgaatttttacaggatatacaacgttttggtgtcaattaataagagggaggaatttataaagtgaagacagttatagaaggtgtgtatagtccttgttatggaaaagtagagaagctatttgttgcggaaagttcatacgtatacgagtgggagaaattagcgttaattgaaacaatagataaacagaaagtagaaattaaggtaggaatcagtgggtatatcgaatcattagaagtagtagaaggacaagccattgctgataaaaagttattaataacagtgagggatgatcttttaataacaggtagtgattaataagtgctatgtatttcactcttttcaataatcatttttattatgaatgattttaaaaacgcttacatgaaatgggtttccaaagggaaaaggggggatttatatgatggatcaaaaccaaggtttaaaacgtgaattgaaaagcaggcacatatttatgattgcacttggaggagttattggtaccggtctttttttaggatctggatatacaattcatgaagctgggcctgggggagcaattgtagcgtatcttgttggagggtttgttatgtatttaacgatgctctgtcttggagagttagctgttgcgatgcccgacgcaggatcttatcaaacgtatgcaacgaagcacatttcccctgcagcgggttatgtagtcggatggatgtcgtggttaaactggtctgctacgataggtattgaactgattgcagttagtattttaatgaaacgatggtttcctgatgtaccgtcatggatttggtgtgtagcgtttgcggtgcttctctttgctatcaatgcattatcttcaagaagttttgcagaagttgaattttggtttgcaagtattaaagtaattacaatcattgcatttattattttgggcggggcagcaatgtttggttttctagatatgaaaggaaatgaaccagcaccaatgttctctagttttactgattatggtggattgtttccaaatggattatccgctattttaattacgatgattgctgttaatttttctttccaaggaacagaactagtcggtattgcagcaggtgagagtgaaaatccagaaaaaacaatcccaaaggcaattaataatacagtttggcgtatactcgtgttctttgtattatctattttcattcttgcaggattattcccatggcagcaagcaggagtgatagaaagtccattcgtagttgtatttgataaaattggtattccttatgcagctgatattataaacttcgttattattacagcagtactatccgttgcgaattcaggattatatgcaacttctcgtatgctatggtctatgtctaatcaaggaatgattagtccgatttttggtaagttatctaaaaatggtgttcctatttatgcattgattgtaagcacgattgtaggctgtctttcattactatcaggtatttatgcggaagatacagtttatttatggctactttctattgccggatttggggcgatattagtttgggcatctattgctttatctaacttattagctagaagggcatatgttaagcagggcggagatgtgaaggacttgaaatttaaaacaccgctatatccattcgtaccacttctggcattagcattaaatataacagttatagttgctatggcttttatcccagagcaaagaatggcgttatattgtggaattccatttatgattgtttgtttactgttttaccgtgcgacaagaaataaggtacgtaaagtagagcatattgaaaagatcaatacaacaaaagtagaaagtttataatattgagtaatttggagactgtaaaattgtaaacagtctctttttttgtgaaaataaagctggaaacatactatgtatgcaaaggggaattagcgatgaatcaagaagtttcacagctattagaacagattgatttacgaaaagatgagttactagagcttacaaaaaccttaattcgttttgaaacactagcaccgccggcgagaaacacaaatgaggcgcaagaatttgttgcagagtttttaagaaaacgaaattttagtgttgataaatgggatgtatatccgaatgatccgaacgttgttggggtgaaaaaagggatagaaagtgacacacataaaagtcttattattaatggacatatggatgtagctgaagtgacagcagatgaggcgtgggaaatgaatccgtttgagccatttataaaagatggttggttagttggacgtggtgcggcagatatgaaagggggattggctggggcactatttgctattcagcttttacaagaagctggcattgaattacctggagatgtaatctttcaatccgtaattggggaagaagttggagaagctggcacgcttcaatgctgcaggcgaggttatgatgctgattttgcagtcgtagtggatacgagtgatttacatatgcaaggacagggcggcgtaattactggatggattactgtgaaaagcccgcaaacgtttcatgatgcaacacgtaggcaaatgatccatgcagggggacgtttattcggagcgagtgcgattgaaaaaatgatgaaaattgtgcaaagtttacaagaattagagcgccactgggcagtcatgaaaacatatgaaggctatccatctggaacaacaacaattaatccagctgttattgaggggggaaggcatgcggcgtttattgcggatgagtgccagttatggataacagtgcacttctatccgaacgaaacacatgaacaaataataaaagaaattgaagagtatattggaaaggtagcagctgccgatccatggttaagtgaaaatccgccacaatttaagtggggcggagaatcaatgattgtagatcgtggtgaaattttcccttcattagaagtagatagggaacatgcagctgtaaaaaaacttagctcagtacacgagtctattttatcaaaaaatgcaattttagatatgtctgcaacggtaactgatggcggttggtttagtgagtttcacattccagcgattatatatggaccaggtacattagaagaagcacattctgtaaatgagaaagttgaagttgaacagttaattgaatttacaaaagtgataacagcatttatatatgaatggtgccacacgaaaaaatagatttgtatagtaaaatcgtacgagtatgtatacttgtacgattttttattgaactatttcagagttgaatataaacaactgaaatagttctttattttgctatgtctttcgttttatttcaagtaatttctcttttgctaattcaacggcgatcgcatcatctaaatagccaattggaaagagatagtcgggaataatatctgtcgataaaatgaaataaagtaatgcgctcccaagaactgcacgttcttcttttgaaatggtttcattgcaaaattgttgatacatatctgttaattgttcaataaaaggacctgcactatcaatttgctctaatttgcttgcgaaactgttatgaatacgtttttcaccttctgttgtctgggcatagcgttcgtaattttcgagttcttgttttacgcgagttgtagtgtaatcgaaatcgaataagttagaggattgcagcgtttgctgaatggtatcaagagatgtgtacatatctgttttttctttatttatgtgaggagaatcagggtacatttcatcaaataacaattggggtggaacttgaagacattctgcaaatttttgtagatgtttttgttttggcggttgtttgccattaataattcttgagactgttgcaggatcaatatttgtaagtattcctagttggcgcatagataaggcgcgttcttttaaaagtttttttattaatttgccaagccgatcattcgggttttcattagccatagtgtaggcactccttttttagtgttgaaaaaatattgagcatttattacaagtatatgaaacagacaggcacagttgctcaacattttcataatatgcattgaaaagtgagaaaaaggggtgactatttatgagtacggtaggcttattttcaatttttttaatcgggatcgcttctaatttagataatgcaggtgttggaattgcatatggcattcgtaaaattcgtatttcgtggtttaacaattttatcattgcattctttggatttttatttactttactagctggattttttggaaactggattgcgttatttatttcagagtttacagcaaatctgattggagcaatctttttagggataatcggtgtgtttattttatgtcagcctttcttgggccaaaaaaatactgcaggttctaaagatgataatgtacttatgggaattttacgtgatccggaaaaagcagattttgatggttctaaaacaattagtttctcagaagcaattgttttaggagttgcgttgtctattaataatattgcaggtggatttgatgcaggggtaacaaatttaaatctttggcttacagcgactatttctggggtgtttagttttatttgtattagtggttttgcgtatgtaggaaaacgatttttagcagaatacttagggaaatgggcgacagttatcgcaggagtgttattaattcttattgggatcgatcagttgttgtaaggagagtagaaaacaaggttcgagtatttccttggaaatacagcaagagattgcatatatcgacgtacttttctccatactaatacggatttcttttaagaaagggggatttgtatgggacgcgggaaagcatttgatcataagaaaaaagggcatgatcatcaaccacctaaaggtgcgttcattcataaagatgtaaatgaacatactttggaagaggaagagctaccagtaaatattgaggcgtataaaaatagtttaaaaaaacattaaaagcacctacataggtgcttttttaccgtatatcttcaattaattgttcggattcttcatgcatactgtactcacttaatacttgaatgcaaagccactttaattcttcaatcgtatgctcaagttcttcaggaagcacatgataaatgtcttcaagtcccatcccgaaatgaataagttcaagtacttgatcatcgatgttccgatccattaataattcaagtacttctaaattgaatatgtatcggtgagcttcgtcgagtgaaacaacttttaacttcaagctttctacaatactcaatataaaaagaaggattgttttttcaagaacaggttgttttcccatttgaaatattagtttcatctttcacacctccacatatagcgctaggttgtactatattattcaggaggggggaacaaatatgcatgatatagagaaactttcagcactgtttttgtaagaggattgataactgacaaaagtgaggttttggcgaaataaaaaatcctgctagtatagcaggataactcgcgattaaaaaatgctccaaccttcttgagcagaaagaagttcaagaattttaaaaccggcaatactatttccgtttgcatctaaagctggtccgaaaataccgattcccatgtctccttttacgcagccaaaaataccaccggctacaccactttttgcaggaataccaacacgaattgcaaattcaccagattcgttatacataccacatgtgaccataaatgttttgcaaatttttgtaatatgtttagggatgatttgttttttcttatatggatcatatccatccattgcaaaaattaagccgatacgtgctaaatcgatgcagtttacttcaactgcgcattgacgagtatataaatccataagttcttcaatatcacaatcgataattccgttttgtttcatataataacaaagtgaacggtttaggtaagctgtctctagttctgaatcggcaactttagaggaataattaatagtaggattatctgttatttcacgtacaaaatgaagaatacgttccattttttcctcgttatcttttcctgctaacatgcttgtaatagctaaagctcctgcatttatcattggattaaggggtttggacggacttgtcgtttctaacttaataatagaattaaatgggtcacccgttggttccattccaactttagaaaatacatattcttcaccacggtctaaaagggcaagggcaagtgtaattactttggaaatactttgaagagtaaatagtgtttgtgagttacctgcatggatatattctgtttctttatggaaaatggcaatccctaaatcgtctggatttgcatttcctagttcggggatataagtagcaagttttccttttttcgtatatggttttacttgttctaacaactgttgtaagttgtttgtttcaatgcactgcatagtaccaacgctcctattttgaattaactaagtttacttttcccgatatgctcggaaataaataataacatgaaaaagtggaatgataaaacgaaagttcaatgtgctataataggtctttcgtttcgagtattctgtattttaaaaaggagaattttccttttatataacagtttggaaataggagatttatccataaaaagttcagaaataaaaactacacatctatacaactatatgttattatggttatgtaatagaaagcgttttctaaagcgtacttataatgataacgatttcataaatttgattagggggaattaaaatgttgcagtttttacaacgtattggtaaagctttaatgcttccgattgcagtactaccagcagcaggattattgcttcgtttagggcaaccagatgtatttgatattcctgttatggcacaggccggcgcagcagtttttgataacttagcacttatttttgcaattggtattgcaatcggtctttcagtggatggtagtggtgcagcaggtcttgcaggtgcaattggttatcttgttatgaaaaatagtattgatgcacttagcaaagggtattcaactgctgaattacaaggtaaattaggtaaagtccaagatttaataggtaatagcgcaaatgtagatccatctaagcttgcggatacaatgacacaagtatctaaggctgctgaattatcgactaaagtagatatgaaagtcttaggtggtattattgttggtgttatagcaggacttctttataataaattccataagattaaacttccagaatggttaggtttctttgctggaaaacgtttcgttccaattgttacatcagttgtgatgctgatattaggaattctatttgcacaaatttggccaacaattcaaaatggtattgatgcattagctcatggaattgttaatttaggtgcaattggttcaggactatttggtttattaaaccgtttattaatcccaattggtttacaccacgtaatgaacacatacttctggtttgtatttggggactttacaaatgcagcaggtaatgttgttaatggtgatattgctcgtttccttgcaggtgacaaaacagcaggtatgtttatgactggtttcttcccagttatgatgttcggtttaccagcagcatgtttcgcaatgattgcagctgctaaaccagaaaagcgtaaagcagttactggtatgttagctggtctagcattaacttcattcttaactggtattacagagcctattgaattctcattcatgttcttatcaccagtattatatggtattcatgctgtattaacaggtctttctttattcattacaacatcgcttggcattcatgatggtttctcatttagtgccggtgcaatcgattacgctttaaacttcggtattgcaacaaaaccagtcttactagcaggtattggtttaatttacgcagcaatttatttcatagtattctacttcttaattaagaagttcgatttaaaaactcctggtcgtgaagatgacgatgagttagttgaagatggtgatgcaccagttgcaggttcaattggtgaaacttacgtagcagctttaggcggaaaagaaaacttaacagttattgataactgtgcaacacgtctacgcttacaagtaaaagatgctggtcaagtaaatgaagcagcattaaaacgtgctggtgcaaaaggtgttatgaaattaagtaatacaagtgtacaagttatcgtaggtacaaatgttgaatctgttgccgatgatatgaaaaaacacgtataaataatgagataagaggatgtccaaaaagattgataacatcaattttttagaggatatcctcttttttttgttaataatttaacgggaatcttacttttgtaaattttctttttcttttttgtacatataggttggtaatatgtgcagtgcgtgataaagtagggatgatatagaatggattatccataatctactaaaataaatctttaatagaggaattaaattattggtgagtaaggggaaaaaagcaattatggatcaggaaaaaaataatgcgaatgggaaagtacgtcggccgattgtatacatcaaaagaacaatcattctcgtcttactattatcacttgtatatttcatgtatacaaaaattgttgcgcataataagaaagaagaaactttaaaagcggcagcagaaatgaagaaacaagaagagctaaaaaagaaagaagaaaaaaagaaacaagaagtacagaagcaaaaacaaaaagagcaggaagaacaagtgaagcaagcgcaagttgcggaacagcctgctgaaggaccaactcaagaaattaatgaaaacgctcaattggaccagtatttaaaaaacgcaggctttagcgggacagctgttattgtgaagaatggaaaagttcttttgaataaaggatacggtatggcaaataaagagcagcaagtaccgaataattcagagacgactttttatattggttctatttcaaaggcgtttgtagcaactgctattatgcagttgaaagatcagaataaattacaagtagaagatactgttgcaaagtatattccaaatttcccacaaggtaatagtattcagctaaaacatctattaacacatacatcagggattcccgaatatgagcagggaaaagaagatatttctcatgaagaactgataaagcggataggaaatcaaaagcgtattggtggtccaggagagaaatggaagtattccgattcgaactactccgtacttgcatacattgccgagaaggtaagtggacagtcgctcgaagaatatattaaacaacatatttttgctactgcgggtatgaaacattctggttttggcacagcgttagaacaaacaagattcccatcaacgggttataaaatagtaaataataatatgacaacacctaatattccgagcatgtcacaactatatggttgtggtgatatatatacgagtgcacatgatttatatttatttaacgaagcgttatactctggaaagttaatttcaaaagcaagttacgatcaaatgtttacagccgtgaaaaaggattacggatttggctggtacgtagacccaggaagctattcgaatcatggtgtaatgccaggttggaattgtttaaatggatttagtaaaaacggtagtgtgtacgttgttttattatctaacattcaaaacaatattaaatcatttggtaaagtgaataacgatatatatacgatgttaagaaatattgaagtgtaagaaactatccttttggatagttttttttatgccctgaaacaaatatttcttttagaaaatgtatgtcttacctatcacaaaaatatctattttgtatacattaagatgtatggatgtatttttataatttaaaaataataggaggagaagtatatgtgtctgttcagtaattattggaaaaagttatcaagattgtttaatagacaattagattattttttagataataagttattgcctgctgtggaaagacttttattttcgcaaaacttcgcgaggtttattcaaagaaattccaagcaagctacagaagaatttattaaatcaagtcaatttcaatcgattatttgtaacattttaaaagaatgtaatacatcaccttttaaagaaattgcagagcagtatttaggtaaaaacgtagaaattactgtgacagtgggacagttaacaggcgttattgtagcagttggtgatgacttcttaacattgcaagaaggaataggaacagaagttttattaccatttacaagtattatatcaattaaagaagcgtaagaaaggagacttatatatgttatttactgaagaattacgtaaccatgttggtgagttagtgcaagttgtgacagcggccgaaattgttgcaggtattctgttatctgtgacagatggagcagtaagtgttcgtacttctccttcttatggaccaccggaagatgtagttgtacgtattcctattatttcatatgttcgcttggaagggtaagagtgatacaagtatgagagtgtcagttgttattccagtgcataatgaagcaagtactttatcaaaagttttagtagaagtaagaaagctcgaaccatatgaaattatcatagtagataatggatcgacagatggtacgaaagaaatagcgctacagcataattgccgtgtaatttattatagatattcccttggtaatgatgtgggacgggcaattggtgctagagaagcaaaaggtgaaattgttttatttttagatggtgatatcgtcatgaaaagtgaagaattatacaattttattaaaggaatacagcaaggacatgagattgttttaaataatttaacatggtccgtttatttgaagatgagaccgcattatacgacggttggaaaatatatgttaaatcgttatttgaacaagaaggagtttgttgtaggatctttaattgcaataccacatgcgataagtcgtaaagtgattgaaaaactggggtggtggaatttagcagatccagcattatttcaagcgatggcgatgtctagaggagtagatatttctgatatggcttcagttgatgtcatttacacaaataaagttcgtcctgtccatacgggcgcatcacctggctctccttatccgaaagcgactagtcgtattatgggtgatcatttgcgtgctttacaatacgtaatcgaaacatacggtaatcgcggtggtttttcagaggacaatagagatagagcgtttgtaggaaagtataaaccagttttattacaaaagaaaaaagcgaaatatagtgccattatcccggtatcagaagaaaaaataactataaggtctgttatacaagaagtgaaagaagcaggtgtagatgaaattatagttgtcgcgaatggagcagatgttgagactgttaaacaggcaaagctagagaatgttattgtagttgaatttacgaaggcgcttggacataatgtagcacgagcaataggggctatgcatgctacggcagatatttgtttattcgttgatggtgattttgttattccagcaaaaaaactcactccatttttacatgctgttgaagatggaaatgacgtggtgttaaatgatttacaatgcttattagatatgtttcatccagcagatccaattagtatgggaaaatactttttgaatttggtagcgaaaagaccagatttatggaataactcactaactgctgtaccacatgccatgcataagaaggtaatagagaaaataggatatgacgcccttatcattccgccattagcacaagtgaaagctattttagaaggattctctattacaacagtagagttagtagatgttataaaaacaaatcgagtacgtccagagcaacacgaatttgtaaatgggcgtatttcagcgtttgatcgtattttcggtgatcaacttgaggcggttacgtatttattacaacgtacggatgaacgtggtggctttactgatggagatagagatagagatatcattcaacaattgagaagggaagaagagaatacaaatgaatagtagtaaagtagctattattgggttagggtatgttggccttcctttagcggtacattttgcagaaagagggcatacagtacttggattagataaagatattagaaaaatagactcaattataaaaggagaaagttatattccagatgtttcttctaaagagttacaaagtttattgacgaaaaaaaaattaacagtaaacacaccggatcaaggcattgctgattttcaaagtagtgattatgttattgtcactgtcccgactccaattaatgaacaaagagaaccagatttaagtgccctcatttcagcttcgcattatatacaacaaaaccttcaaaaaggacaaaccttcatttttgaaagctccacatatccaggcacacttgaagaagtcatcatacctattatttctcaaaatagtaacaaggtaggggaagatttctatatcggatattcccctgagagaattgatccagcaaatagtcaatattcagttcaagctattccaaaagttattagtggacaaacagaaaagtgtagacaaaaggtacaggatttatatagtaccatttttgacgaagttgtacctgttagctctccgaaagtagcagagatgtgcaagctatttgaaaatattcagcgcttagttaacatttctttagtaaatgaactaaacacactatgtgaaagtttaggcattgatttttatgaggccattgaagcggcatctacaaaaccatttgggtttactccatattggccagggccagggatagggggacactgtattccagtagaccctttatattttcaatggagaataaaaaagaatggggcaattagtcaattaattgaggcagcacatataattaatgaagaaatgccagagaaaatggtccggaaagtaaaaagtgtggtgcaatcacctgcaacggtgttaattgtagggattgcgtataaaaaagatgtaaatgatttgagagaatcaccagcgttaccgattattcaattattaagaaatcaaggatacgagatagaatatcatgatccttatatttctttcgcggaaattggagataaggtgtatcaatctgtttctttagatgaagaaaaagttaaaaaagcggattgtattttaattttaacggatcattctaatattgattggaagctttttaaaggaatggaccgagtaatagatacacgcgggattgtaaagaaggtgagtaaatgagtaagaaatgtttaattacaggtggggccggatttatcgggtcgcatttagctgaagagttgatgagaagaggttatgaggtcactgttgtggataacttttataaaggtaaaaataagtaccataaagagttaatgaaaaaaatccgtgttattccaataagtgttttagataaaaattctatttatgaattagtagatcagcatgatgtcgtgtttcatttagcagcaattttaggtgtgaaaacaacaatggaaaaaagtatagagctcatagaaacgaattttgatgggacgagaaatattttacaagcagcgttaaaaggaaagaagaaagtagtttttgcttctacttcagaagtatatggtaaggccaagccgcctttctctgaagagggagatcgattatacggggcaacttctaaaattcgttggagttatgcagtttgtaaaacgttggaagagacattatgtttaggatacgcattagaaggtttaccggtaacgattgttcgatattttaatatttatggtccaagagcgaaagatggtccgtatgcaggggtaatcccgcgatttattagtgcggctttgcaaggagaagacattctcgtatatggagatggaaagcagacacgttgttttacgtatgtgagtgatgcggtagaagcaacaattcgggcaatggatgagaaggtaaatggtgagattattaatataggttctgagaatgaacagagtataaaagaagtagcagaagtaattaaaaaattaacgaattcttcttcgaagattgtacaagtgccttttgaagaagtatatcctcatggttttgaagaaattccaaatagaagaccagatgtaacaaaattaaaaaagcttgttcaatttcaggcgaaagtaacgtgggaaaacggattgaaggaaacaattaagtggtttcgtgaacaaaacaatggctaagtcattatctgttattattcctgcatgtaatgaggtcgatacgatttcagacgttattcaatcggtaagaccattaaatccagtagaaattattgtagtagcaaacggttgtaatgatggaacagaagatgttgcagatcgtttagggtgtaaagtaatcaaacatacagagctactagggaacgatgttggacgtgcagtcggcgcaaaacatgcgataggtgatgtattactatttatagatggtgattttgctattcaaacttcaaaattaaaattattccttaatccgattttatacgatcaggcagatgtagttttaaataatttggatgcattatttttaaaaaggcaaaaacctacttctattacagtatggcgccaaatattaaatgcaatgttagagcgtgaagaattaaaaattaattctttattagatgtacctcatgcgctgacgaaagaagtcgttcaaagcatcggatatgaatgttttgttaatcctattgtggctcatttacgcctacttcaaagtaaatggagaattagtcgtcattgcgccattgacgttattacgccaaataaatttcgtccattccagcatgctgcatatggaacaaatctttcccaatctgaaaaaagaatgataggtgatcatatagaagcagtagcggcacggatattaagcagtgatgagcgcggaggatattatgatggaaataggaaaagggatagtgtctatcatactttaagttttgaagagttttatcaaggatggggcgtcacatctaatttgtataaaggaaagcaactatctgttgttattcccgtacaagatgaagagaaaacaattggaaacgttatagaagagcttcgcaaaattgaacccttcgaaattatcgttgtcgtaaatggttcgtcagataaaacgaaaaaaattgcaaaagacaaaggggcaacgacaattgtatataaagaagcactcggaaatgatgtagggcgctcacttggaacttattttgccaaaggagaaattgtgttatttatagacggcgattttattattccagcgagtgagctatatccttttgcaaaagctatagcagatggaaaggacgtcgcattaaatgatttaaatcactatttagatttaagagtaccacttcatcttgtaactgcatttaagtatgcactaaatttagcttgtgatagaaaggatttaggggtaggctcacttattgcggtacctaatgcatttagccaaaagtgtttgaaagcaattgggtataaatctttattgtcaccttgtgtagcacaagtgaaggctcttctgtctggatttgaaattgcatgtgtatatcgtgttgaggttgataagatgaaccgtattcgtcccagtgaacatttcgcaaaaataggtcaccctccagctgtacttcgaattataggtgatcatatagagggactagagcaaataatttcattaacagacaatcgtggcggattctatgatggcaatagaaaaagagatgttttatagaagtaacaaaaaagtgtacaacatgtgtacacttttttgttctgttataaaaactataacagattaggagataagagtattacagctctacaatgggtattgttcttatattacaaaataggactcgtatataaggataccaaaaaaatacaattaaggaaagggttaattttaaagacttttaaatgaagttaacactatatatatagtagtttgctcaatatttcacaaacatgtcacaactatttcgttcactttcgtaaaaaagtagtattctaagtgtgtaagctgttatataaaaaatcttagtcctgtactaatcaaaaatggaggagattaggatgactcaagtattagaaaatgttaaaaacgcatgggaaaactttaaaggtgaaaaatggaaagcagagattgatgttcgcgatttcattttaaataatgtaaacgttttcgaaggagacgaatctttcttagcagaagcaactgaagcaacgaaacaactttgggatcaagtaatggatttaacaacgaaagaacgtgaaaacggtggcgttcttgatatggatacaaaaattgtttcttctattacatcacatgcccctggatacttaaataaagatattgaaaaagtagtcggtttccaaactgataaaccatttaaacgttctttacaaccatatggtggtattcgtatggcagaacaagcttgtgaatcttatggatacgaaatggataaagaacttagtcgtatttttagagattggagaaaaactcataaccaaggtgtatttgatgcatacacaccagaaatgagaaatgcacgtaaatcaggtgttattacgggtcttccagatgcatacggacgtggacgtattatcggtgactatcgccgagtagcgttatatggtattgatcatttaattgaagcgaaaaaagctgatttaaatttaactggcggtgtaatgagcgaagatacaatgcgtttacgcgaagagttatctgagcaaatgcgtgcacttcaagagttaaaagaaatggccgcttctcatggcttcgatatttctaagccagcaacaaacacgcaagaagcattccaatggttatacttcgcataccttgcagcgattaaagagcaaaacggggctgcaatgagtcttgggcgtacttctacattcttagatatttacattgaaagagatttagcaaatggtactttaacagaagaagaagtacaagaaattgtagatcacttcattatgaaattacgtcttgtgaaattcgcaagaacacctgattataatgaattattctctggtgacccaacttgggtaactgaatctatcggtggtatggcattagatggtcgtccattagtaacaaagaactcattccgtttcttgcatacattagataatttaggaccagctccagaaccaaacttaactgttctttggtctaaacaattaccagagaactttaaaaactactgtgcgaaaatgtctattaaaacatcagcaattcaatatgaaaatgatgacattatgcgccctgaatacggcgatgattacggtattgcatgttgcgtatctgcaatgagaatcggtaaacaaatgcagttcttcggagctcgtgcaaacttagcgaaagcattattatatgcgattaacggtggtaaagatgaaaaatctaaagcacaagttggtcctgagtacgcaccaattacttctgaagtattaaattatgaagaagttatgcataagtttgatatgacaatggaatggttggcgggtctatatttaaacacattaaatgttatccattacatgcatgataaatatagctatgaacgtattgaaatggcacttcatgatacaaacgttcttcgtacaatggcaacaggtattgctggtctatctgtagtagcagattcattaagtgcaattaaatacgcaaaagtaaaaccaattcgtgatgaaaatggtattgcagttgacttcgagattgaaggagatttccctaaatacggtaacaatgatgatcgtgtagatgagattgctgtaaatcttgtaaaaacatttatgaataaacttcgtaaacataaaacatacagaaattctgttcatacaatgtcaatcttaacaatcacatctaacgttgtatacggtaagaaaactggtaatactccagatggccgccgtactggagaaccatttgcaccaggtgcgaacccaatgcatggacgtgatacaaaaggtgcattagcttcattattatctgtggctaaattaccatatgaagatgcacaagatggtatttctaatacattctctattattccgaaagcacttggtaaagaagatgatgtacaagtacgtaacttagtatcaatgcttgatggctatgcagtaaaagaaggccaccacttaaatattaacgtatttaaccgtgaaacattaatggatgcaatggaacatcctgagaaatatccacaattaacaattcgcgtatctggttacgctgtaaactttattaaattaactcgtgaacaacaaattgatgtaattaaccgtacaatgcatgaaagcatgtaaatgaaaaaagtgtcccttcgctcttaatatatagcgaagggaggctgtttcaataaaggaggaagtaacatggtaaaaggaagaatacattctgtagagtcttgtggtactgttgatggcccagggattcgttatgtcatatttacacaagggtgtttattacgttgtcaatattgtcataatgctgatacgtgggaaatcggtaaaggtaaagaaataacagttgaagaagtgatgcaggatgtgacatgttaccttccatttattgaagcttccggaggcggtataacagttagcggtggagagccattattacagctagactttttaattgagttgtttaaaaagtgtaaagaggctggtatccatacaacaatcgactcttctggtggttgttattctgaggaaccagaattccaaaataagctagatattttaatggattatacagatttagttttattggatctgaaacatatcgattccaaaaagcatcgtaaattaacagggaaaccaaatgaacatattttacaatttgctcgttatttatcggataagaataaaccgatttgggtacgacacgtattagttcctggtgttacggataatgaagaggatctacaaaaactatctagctttattcaaagtctgtctaatgttcaaaaagttgaagtgttaccatatcataagcttggtgtatataaatgggaggcgcttggacacaagtatccactcgcaaatgtagaaccacctactgagaaaaatgtagaacatgctaaatatattttacaagcggtctaatccaaatattggattaggctttttgctttctttacaataaaatctagagtatatattgataaaagagtatactgaaaatagaatatccataattttgtacggaataaatggagaaatttacataattgtaaagggaaatcaaaatagtaaaaagaattaagaagtaaaagagtgagtatcatggaatagagaacatttgtaagttattgcgaaagctcttataggaaagtataatgtaaagatatgagcacagataggattaaggggtcaatcttatatgctttgcatatccacgacaggtacatagctgaaagggaattattagaatctgtttatgtaatttttaaggaaaatgtttttcctattgtcgtatatgcaatatggagaaacaaaaagctaggagtggatttgtttgataaaaaaccccaaggttttaatattaactgcacattacggtaatggtcatgtgcaagtagcaaaaacattagaacaaacatttcgccaaaaaggaattgaagatgttattgtatgcgacttgtttggagaatcacatccatttataactgacattacaaaatatctatatttaaaaagttatacaataggaaaagaattatatcgtttgttttattacggggtagaaaaaatttatgataagaaaatagcatcttggtatgcgaactttggaaggaaacgtttgaaaacacttttacaggtggagaaaccagatattgtaattaatacatttccaattatcgctgtaccagaattaaagaaacaaacaggtatttcaattcctgtctataacgtattaacggatttttgcgtgcacaaaatatggattcatcgagaagtagatcgttattttgttgcaacggatcatgtgaaagaattgatggttgatatcggtgtacctgcggaacaaattgttgaaacaggaattccaattcggagtagttttgagttaaaggtaaatccagaaatcatatataataaatatcagttatgtaagaataaaaagattttactaattgtagcaggtgctcatggggtattaggaaatgtaaaagaactatgccaatcatttatgtcagtgcctaatttacaagtagttgtcgtttgtgggaaaaatgaagctttaaaacaggatttattaagtttacagaagcaaaattccgatgcattaaaagtgtttgggtatgttgaaaatattgatgaattattccgtgttacttcttgtatgattacgaagccaggcggaataacattaagtgaagcagcagcgttgcaagtacctgtcattttatataagcctgttccaggacaagaaaatgaaaatgcgatgtactttgaaagaaagggagcagcagttgtcattcgcgatgatagtgaggtttttgcaaaaacagaggcattattacaagatgatgtgaagcttcttcaaatgaaagaagcaatgaaaagcatctatcttccagagccagctggccatattgtagatgcaattttggcggaaaatcatgcagaaccgcgtcatatacctattaaatcacctgctcttgcacaatcttttacttaatatgaaaccctctttgtatatgtaaagagggttctttattatttttaaaggaaatttagtgagttatccacaaaaggattgcgctttcattaaacagtaaagtcggaatattaacaactatatccacattgtccacaatttttagaaaaatatccacaattaaaacagctgatatatgctttaatatagaaaaatattaaatgtttttgaaaattactaacaatttcatcggttttgtggataaagttgtccacagcaaaaaagtcccttatgtataaggggcttttttgcttacttctatcagtcgagaaaattatgtaatgaaaatgaataattaggggggaaacttctaattattcattttcactttaaatgcttttcgagcgatatcctgctgcacgatctgctttttgaaattcgcgttgatagagaacttcttgtgtactagataatgtgttttttgctttatcacgtttctttttatccattacaaatcacctcgtgtcttaaagttactatttatcgtttccaaagacatgaggggatatacgcatatggaaaatgttaacgattgattatcatttcagaaaatttagattacgcttcttttaattgatgagcatcttggaaggttgtatctcgcattgtagcaagtgtgtattgatcttttggaatttcatataagttatacacttcttcgtttgcgttaatttcatcatatacggcttttcttgtttcgtttgctagattcacatattgcagtttttctgcagctttaatagaacgaatatttattttacgaatacgcatgaaaattgtttcaatatctaattcatagaaaagttcactaaaaaatgaatcttttgccaatttgttatagccttttccatgatatggtttgccaagccatgtcccgagaaatccagctttttcttgcacatcaaataaagtaattgttccgatagggttaccccattcatctaaaattgtgcgtgaaattaattcaccacgctcttcagcttcaatcgtttgtttcgttaagaataaatattcttcataagaataagccttttgacgcacaaaagggaagacagctggatccaccattaactcgtatagaacgtggctgtcgtgtaagtcgcgttttttcaacatactaactcctcctcacacgagggtagcatgacgaaaaaacaccccaccctcgaaatttttatatcaatctttaaaaaatttcggggtgggaatcgaacccactagaaccagtttctaacgctggtggcgcaccatttgccttccccattcatcaatttgaaaatgataatcacgacacaaattgattatggtttcattcagtttataatcgtataatactttatctagtcaaaaaaataaactagttttttttattttttttgtaaattatttttccatcaatcatagttagtacaggcttggctaaataatggaaaggatgatgagtccatagcacgagatcggcgtcttttccaacttcgatgcttccaattctatcctctaaacgcaaatttcgtgctgggaatatggtgattccttctagtgctgttttctcgtctaacccttctcttactgcaacagcagcgcaaacatttaaatattgaatgggtgtataaggatgatctgttgtgatagaaacttccacaccattttttgataatatatggtaagtatcccatgttttattttttagttcgattttagaacggcgtgtcagagtgggaccgactgaaaccttcaaattgtgttttgaaagttcttcaacaataaagtgtccttctgtgcaatgttcaatgcgtaaatcgagattgaattctgttgcaaagcgtagagcagaactaatatcatctgctcggtgagcgtggatacgtacgggtatttcacgacgtaatgcttttaaaataggaagcattcgaaaatcagcttcgtgcccgtagtgttgtgcttcatagaatgattcccgaagtaaccccataatccccatacgtgtaatggattcttttgttccattactatggacttttttaggattttctccaaaggcaatctttaaaccagcaggttcttgaataatcatatgatcaatacaagttccagctgtttttattacacaagtagtacccccgataatattttgactgccaggcataacgtgaacggttgtaattccgttttgtacagcgtcttgaaaggcaatatcgaaaggatggattccatctaaagaacgaatatgtggtgttgaaacttcagatgtttcattggcatcatttccagcccaaccagtaccttcatcatagagaccaaggtgagtatggacatcaataaagccaggtaagagatggagtgctcgtgcatctataacggtcatatcttgagtaggtggaataaaaggtttgacctcggtaattcgctctcctgtaacgagtacatctccttgaaacttttgagatgtaatagggtatacaatggcttgtttgagcaatattttcataggtacctcatttctgttactttataatgctaatggaagttaagggaaagtaactgaaaggttatttgtatggtaatgcttcggatcctagaaaatgaaagttttgaaagagcccatgtaaaattgtgttttagaagtactacattgtatgcgaaagtatattttgtaatgcatggtctatttctggaaatgtgtattggtatccatgttcaattgctttaatgggtaatacacgttgcccttctagtacaagtatgctcatttcacctaataaagtttgaatgataaaagaaggtacaggcaaccaatgaggctttttcattatagttgcaatggtttctccaaattccttcattcttataggtgttggtgctgtcatattaagaggaccatcaatttcttttttgtgtataatgaaatccatcatacgaacgacatcgtctatatgaatccatgataaccattgcttcccagaaccaatggtgccgccgatatagaattgatagggaagtagcatttttggaagagctccttcatttgcacctaatacaactccaaatcttgcgtagattgttcgtattccgagagaacgtgctttagatgcttcttgttcccatgaatatactgtatttgctaaaaagtcatttccaggagtctcatgctgttctgtaaaagactctatttcagacgttccatagtatccaatagcacttgcgttaataaatgtgtgtggctttgtatggagtccctgcaattgtttaatgagtccttttgttgtttgaattctactgtttaaaatggctttcttttgttgctttgtccatctactattaatagactctccggctagattaataactacatcaatagaagagagggggaaggtttgtaaatctggtgtccattgaacatactgaaggttaggatcggaagtttcagtagttttttttcgtgtgagaatgtaaacagtatatcctttttgaataaaaaaagtagaaagggatttaccgataaagcctgtaccaccagaaattgcgattttcacaagtatttcctcctcattatatatattcttgaaaagaaaaaatgttcctcgactatgttaaaataatagagaggtgagagtatggctgtcattacaaaaatagaagtacaaaaacgatcgaaagaacgatttaatatttatattgataaaggtcaaggcgaagagtacggatttagtgtggatcaagtaatcttaataaaacatggattacaaaaaggcttagaaattgatgaaatcgagttaggaaatattttgtacaatgaagaagtgcaaaaagcatatttacaagcaatctcctatttatcctatcaaatgagaacaaaacaagaaatagaagattttttacgaaaaaaagaagtgggacaggccatcatctctgaagtcgtttcgaaattattacatgaccgatatattaatgataaagagtatgctgttttatatacgcgaacgcaaagtaatgtgaatcgaaaaggtccaactgttattaaaagagagttattaaataaaggtgttcaggatttaattattacacatagtttacaagaatatccgaaggaaaagcaaattgagaatgccttgtttctcatagagaagaagaaaaaatcttatcaaaaacattcttttttacaaatgaaactaaagttagatgagatgcttgttcgaaaaggatattctagagaagtaattcaaatttgtttggaagaattgaaagacgaaaaagatgacgaaaagcaacaagaagcgttacactatcatgggaataaatattatgagaaatataagaagcatgatggatggacatttgaaaacaagatgaaacaagcgttatatcgaaaaggattctctattgatgaaatcgagatatttttgcaaatgaaacgcgaagaggaatgaggagaataagatgaatatgccaaaacgctacagtgaaatgacaccgcatgagctaagggaagaaattggcgctttgaaggagcaagcagtaaaagctgagcagcttgggattgtcaatgaatttgatgtattaatgagaaaaatggcaatggctcgtgcttatatgacggatataaacaaattccgtattggtgaaacatatgaattagtagaagaacctggtgtattatttaaaattacgtatttcaatggggtatttgcttggggatataagcaaaatgataatgaagagattggcataccaatttccttattgcaagaaaaataaaaaccagagagcatatatctctctggttttcatctttggtaggcgttaaaggagataggagattctaaaattggcgttttttacattcatttgccaatataatgagagactgggtttgttgcgtctgtccgttaacttgcgctttcgcatgttttggacgagtccacgtatggttaaataattcagaacgactatctaagcgatcacggtagctcatctttatcacctcgtgtaggaagttaatttaatttgtattactcttcctgctgatttgcagcacgcatacgttcttgtgggtgcgtgttaattgtgccgttaggtcgtttcgaagcgaagcgtgatttcgctttcggttgaccgtcgattttgctgttgttttttgactcagaccaaaattcggcttgtttacccattacgaacgccctcctcattatcggttgatacctctttaagaagtatcaattatagaatgtgcaaaattgaagaaactatcctttagaaatgaagggataaataggtaaaaggagattataatatgaatgatatttatgaaacattaacgaaagaattattagacaagaatgacaagctttcttacgcacaagctcgtgcgtgggttgagttactatgggaagattttcaaacaacttatgcaaaatcaggtcgttatcaaggcgatgaaatgacagaacaagtggtacgatcatggattaataatcatggtgtacgccttcatgaaatgcgtacaaataatccgaagtatagtcatttaattaatcaagaagatcatttgaaacattaaaaaaagcgacttaagtcgctttttttaatgtggaagtaattccagtttttttcgaagcttttcttcactaaagatccatcctgtataggaactaataatatttaaattgtggtcgagctgaacgattgcaacaaatggataataatctttacttcgatatcgtaaatcaatgaatcgtacttcataataatggtcatgatcaaaaatatcccagcgatatacaggagagaaagatagaaaggccgagatgttttcatcttgtttagctgctcgcataatattattgtctgggaacggtacccgatcgaacttatcatatatcatgatgttaccacggtgccatctcgcaacgtagtaataatcagccgtaacgattgctaaatggtaatggtaaaatcggtaagaaggagaaatgataatcttttcgacatttttgaaacgtttgtgtacaacgcttcttatatttctgtgcatcataatccgtccgatatagtaaacaatcattaatatatatgccgctaaagctgtatatcccttatgagaaccgacgagcatgcaagcaattgcaagtatatggataaagaaaattacggtatcgaatgtattaatcacgccgagtgcgacccatttttttgtgaaaggccgtaatgcttgtgtaccataggcattgaaaatatctacaaagacgtgaaggaagacagcaataaatgaccaaagcagtagatgaagatatggagcgtctgaaaagaaggcgaaagagatgccacttataaggaatgaccaaagaattaccgcaggaatagaatgagtaattccacgatgatttcttatatatttagcgttattacgcaattttaaaactgtgtcaatgtcaggaatgttggaaccagcaattgtagcaagcataacagcttgggggccaatatcactttgtgctatggctggatctaatgttgctaagctacctaaagtgatacccataacaaggtgagtggctgtgtccatagaaatccacctccgttttttattaatgtaactctttttattcgatacctcaagtcctttgccttctatttcctgtatcatcttacttaaattttttcctaaaatctttataatagtacttatatgcaaaaaaatgagggggatcaagtttgacacttgaaatactaaacaattttaatatagagcagtttcaaaatgatttaattggttggtttgaagaagaacagcgcgacttaccatggagaaagaataaagatccataccgcgtttgggtttctgaaattatgttacagcaaacaagagtagaagctgtaaaaccatattacgcaaattttatggggaagtttcctacacttgaagcgttagcgaacgcagatgatgaagaagtattaaaagcatgggaaggtttaggatattattctagagcacgtaatttacatgcggcagtaaaagaggtaaaagaagtatacggcggagttgtaccaagtgatgtaaagaaaattgaaaagttaaaaggagtgggaccatatacaaaaggtgctattttaagtatcgcatatggtataccagagccggcagttgatggaaatgttatgcgtgtattatctcgtattttatcagtatgggatgatattgcaaaaccaaagactcgaaaagtttttgaagagattgtgcgtgaaattatttcagtagaaaacccatcttattttaatcagggattgatggaattaggtgcactaatttgtattccgaaaaatccagcatgcttactttgtcctgtacgtgaacattgcagaggatatgctgaaggtgttcaaaaagaattaccagtaaaaagtaaagcgaaagctcctaaaatggtacctattgttgcaggtgtacttcaaactgaagacggtcgttatgttattaataaacgtccaagtacaggtttgttagctaacatgtgggagtttccgaatgtggaacttggagaaggtattcgaaatcagaaggaacagcttatagattatatgaaagaaaaatttgagctcgaggtttctattgatgaatacgcaatgaatgtacaacatacgtttacacatcgtacttgggatatatttgtattttacggaaaaataaccggtaatattgttgatacagatacattaaaatttgtatcaaaagaggtatttgagcaattacctttctcaaaatcacaccgtactatttatgaaaattgtgtggagaaaattacaatgcaataaacaaaaaaagtgttcccaatctagggaacacttttttaatcgtaagaaatttttgtcccatgagtccaactagcttcaccttcttgtaagccgcctcttgattcgatttctactacaatttctttgtaaatactttgcccttctacatttaaataaggcagaacctgttgtagtgagtgatgaaaataagctaattcatcttctttccattcattttttgaaatcatcgttagttcagtcatatcgcgtcctatatacatatttacacctccattttctatagtttgaatgagtaacaaaagttatatgcggaaattttaaaaaagaaaattacggatagcttctaagtgaattggttacattattgattgtggaggtgagaaagatgagtaaaaaacaacaaggttataacaaagcaacttctggtgctagcattcaaagtacaaatgctagttatggtacagagttttcaactgaaacagatgtacaagctgtaaaacaagcaaacgcacaatcagaagcaaagaaagcacaagcttctggtgcacaaagtgcaaacgctagttatggtacagaatttgcaactgaaacagacgtgcattctgtgaaaaaacaaaatgctaagtcagctgcaaaacaatcacaatcttctagctcaaatcagtaatgaaagaaaaacacttctctaattcgggagaagtgttttctttttgcgtggatcgttgtaatgaaaaggaagcgaacgacataacttctaataagtcaacaaatgtagtcaaaggagaaggaagttaaaaattagaattatgtaattaggaataataactgatgaataagtccaaaagggggtaagtaatgaacgattttgataagttggtaggggagcaattagaaacgatggatgagttgttaaagttacaagcacatctagagaagtatcaacaaatcgaaatgaatgaaaaagatacgtgcgataaaaaagaactgcattttatccgtcaggaaatatatagaacagaagtagcgttgaagatgttacatgagaaatttgaagaacaaacgaatagtgtaattcaatcttttacaactgaaaaaatgatttcaaatttaggataagatatattgttatcttcaggtgaaaagtccttctttgtatggaaatagagaagggctttttctattacatgtcctcgcttataaataatgcagtacaatccctatctcttaagaagagttggggcatagtattcaacgataaacctcctgcatattcagtttgaaaaatagagtcttatccctttagttttaaaatttcgacaaaaaagttataatagaaaaaaagtgaatgccgttcaaagggcatttgcagttgaaagaagggagcatatatgggatttcccaaagaaggagaaaaagtacaaatacatagttataaacataatggctccattcatagaatgtgggaagaaacaacaattttaaaagggacacagagtcttgtaatcggagcgaatgatcgtacagtagttacagaatcggatggccgaacatggattactcgtgaaccagcaatttgttattttcatgccaactattggtttaatgtgattgggatgcttagggaagatggcgtatattattattgtaatttaagctcaccttttgcgtatgatcctgaagcattaaagtatattgattatgatttagatattaaagtatatccagatatgacatatacgcttctagatgaagatgagtatgaaaaacatagtcaaattatgcagtatccacctgttattgatacaattttaaaacgaaatgtagcacatttaacacagtggattcatcaaagaaaaggtccatttgcaccagacttcgtagatatgtggtatgaacgatatttaatgtacagaaattaaaacaaacctgcagggggcttcccggcaggtttgtcctattagaggggggattatgtgcaaggcataaaaagatatttacaatttgttaaaccatatcgatggcttattgctattacaattattattggactagttaagttcggtatcccacttattatgccgtggttattaaagtatattatcgatgatgtaattcaaggcgcgggctcacttcaagataaaacatctcaattaataacagcgattggaattgctttttttatttttgcggtattaagaccaccgattgaatattatcgtcaatatttcgcccaacatatcgcaaatacaatactgtatgatttgcggaagcatattttcggtcacttacaaaagttaagtttacgttattactccaatacaaaaacaggggagattatttcgcgtgtcatccatgatgtagaacaaacgaaggattttgtaattactggtttgatgaacgtctggttagatactgcaacaattgctattgctatcattgttatgttttctatgaatataaaattaacatttgttgcgttattgattttacctatttatgtaattgcagtgaaatattttttcggacgtcttcggaaattgacgaaagagcgttcacaagcgttagcgacgatgcaagggtatttgcatgaacgtattcaaggaatgcaagtgacacgtagctttgcgttagaagagtatgaggggaagcagtttgaaaaaagaaataatgaatttttaacgaaagcattaacccatacaagttggacggcaagaacattttcggcagtaaatacgttaaccgatttaggtccgttacttgtgattggttttgcagcatatgaagtaattcaagggcagttaacgctaggaacgatggtagcttttgttggatatatggatagtttatatagtccgcttcgccgccttgttaattcatctacaacattaacacaatcttttgcatcgatggaccgtgtgtttgaactgttagatgaaaaatacgatattgttaatgtaccaaatgcggtacaaacgaaaaaattaaatggagaaattgtatttgacaatgtttcttttcgttataatgcagatgaaaaagagatattacacaacttgtcattaactatgcagcctggagagaaagtagcgcttgtaggagcgagtgggggaggaaagtcatctcttgctagtttgatcccgcgtttctatgatgtttctgaaggcgcggtttatgtagatggcatagatgtaagaaagtacaatatgagaaatttgcgtagtcatattggaattgtactgcaggataatttattgtttagcgatacaattggagctaatattttatatggaaatccgaaagctacagagaaagaagtgattgcagctgccaaagctgcgcaaattcatgattttattatagacttaccagatggttataatactgtcgttggagaacgtggtgtgaagctatcaggcgggcaaagacaacgcgtggcaattgcacgagtgtttctaaagaatccgtcggtacttatattagatgaagcaacttcagcattagatttagaaaatgaaaggtatattcaagaggcgcttcagacgttagctgctgaccggacaacgattataatcgcacatcgattagcgacgattacgcatgttgatacgattatttacattgaagacggtgagattaaagagactggttctcatgaagagttaatgcgaaaaagaggattttattacaatttatatcaacttcaacatataacagaaacagctcctttaccataaaaggagctgtttttttattcgtcttcttttttatcatcgatttggagttctttttctggtttatgatatgtgtagaagctatctacaagcaaatctaaatgctctacttcttcgctatagttaatgatggaagaaataagagggaagagatgtaaccatgttttatatgcttcttcatcgtccttattttgatattccataaagatatcaattaattcttgtttacctgtttcaacttcatcaagcatttcaactgattgttgtttttttgctttaccaataaattttaataaaacttgttcatgataatgcgttaatgagtcaagttcattttggatagattcctgaaattcttccggcatatagcgcagttcattttcagtacggtgtaatgattttaacgtacttaaagcacggcttgttgtcgctaacatttgtctgaataaaacgagcttacgaatttttgcgaactttacttttttcgtatagcttctttcttctttatacagcaaatagtaatgatttagtttaatcattttttctttcatacgatcaatatcagtttttagcgttgtaaaatcagaagcctgcctgctattcattcgaatccattttacaatttcttctgtattatcaacgatacgatgataaagttttgtttcatattttggcggcataaatactaaatttacaagtgaagccgcaataataccaatcataatcgtcgcaaatcgaagtaaggcaaaactaaagaaatcttcgccttgatactccataatggcgataactgttactaaagcaattgatattgtgttttctaatcgtaattgtaatgtaagagcaattactaatatacatgttaatccaataataaaaggattatgtccaaaagcagtagcaaatgcgatagcaaatatcgcaccaattacatttgcttgaatttgttcaagtgctgttaaataagaacggtatacagacggttgaacagcaaagatagctgaaattcccgcaaataccggactcggtaattgaagtaaaatacaagcaaataaagctaacgtgatggcaatacccgtttttaaaatgcgagcaccaagtttcatacccttaataagatcctttctcttgtcataatgaatgtacaacatgatactatacattcattacaatatgttagcaagtgatattttagtgacgttaaaagaaattagtgttcattttatcccgctaattgtgagtagtaagattcctgcctcaaaaattagaagctagatgccggtaaacgctcgattggtgtaggctaattaaagtttcactttataatttttcctaattccttttaaacatcagtttttagtaaaaaaacctgctgaatttcagcaggtctcaaattgttactatagattactatgagaagcgtacttcgtcaattttttcttaataatgaaaattactcattttactctgttgagatagatgggtctgcctgttcttttttcgggataatctcaaaaaactggttctgtatatcatctaataatgctgttaataaagcaacttcctcatattgctcatgttcgtttagtacacgaatatagtctagcaataattcagttacatctttcaaaccatttttactaattggttgtaatgtaacatttgcgccttttgcaattcttctttttaaggcctgttctgttaggcctaagtttgaatcatgacgcaaataaacaacaccgccagtcatgccagcgcaaatccatggaccagggtcacctaaaacaagcgctcgcccatttgtcatatattcaaaagcaaaacctttaatattggagtatgaccctatatttccttgctctttttcacggagtggttttgttattctacctccaattatcatgtctgccccagaaaggcgaatgccagcgcgagcatcagcgttcccttgcacgtatagtgcccctttttgtgcaccatatccaaatccttttccgacagaaccgttataatatactccgtcttttccttttgatttcgttatataaatcccaccaccaaaggaagttttaccaatgccatcttgtgcgccgccatttacgtgtataaataaattttcactattgtaagcgcctaacccatttccgggaatagaaccattcgtatactttaatgtaagtggttcaagttgagtagcttcatatagtttactgcgaacgcgataacatgattctagaccacccataacgcgttgctctacaccaacgcctactaattcttttgagtcagcggaatgaactgtcttaaattgtttttctggtacaccatctgttgttgtaacagatggatgttctattatttgtaataaattacgtaagtttaataaattttcgcctcgaacttgctctaataaatcagaacgcccaacaattgcttgtgaatttgtatacccaagctgtcctgttaatcgttttagttctataccgaaagaggtgaataaatttagcaggccagtaactgcgctttctaattcgcgtgggacgaagcggcgtaacccatgttcctttgcttgtgcttcagactcgatttgtgttgcaattccgacatggcaagtatctagatgacacccacggcaagtagtgcagccgattgcaatcattgatagtgtgccaaatccaatacggtttgctccgagaagcatgattttcaaggcatcatttacacttcgaataccaccatctgcccaaatctctactttatgtctcatgctcgcttctaataaagcgttgtgagcggctttaacaccaatttctacaggaagacctacatgttgcaaggcgtgaatacgtgcagcacctgttccgccatcgaatccgctaatgttaataaaatcagcaccagctttggcgataccgacagcaattgttccgatattaggaacgacagggactttcacggctactttggcaagttgattagctgttttaatttccgtaatcatttgagctaaatcttcaattgaataaatatcatggttattagaaggtgaaattaaatctgagccaattgtcgcattacgtgcttcagcgattttggctgttacttttgaaccaggtaaatgcccaccttccccaggctttgcgccttgaccgattttgatttcaattaagttcgatgagtttagtagttcggcatttactccaaatcgcccagatgccacttgttgtccacgtgtatgtggatattttccaatcatatctttaatttcgccgccttcaccgttcaagctaatcatatttagctgatcggccgcttctgcatatgcgcgaaaggcaatttcgttttgagaaccaaatgacatagaactaataataaatggaaaatcatgatttttaatgccgatagatacttcttcagttggaacgacatgttttgtttgtttcgtttgaacaaggtgtctgattgcgatgggattattctcttctagttcacttaacttgtcacggtaatcatcataagaatttccttttgcaacatcgccgattgctttccaaattcgcgggaatatatgaaatgattttcgcattctaattttaggattgttataatcatccgctcgcatttttgcatcttcagcaagtgattcaagtgaaaaagctaaatcatttgaaccgaagaaatttgtaatctgtaatatatttgcgatttcttcatgtaacccaatagatgaatagagacgtccgtaaccacgtaactcatgaattccaattgttgaaatgactttttctaatcctttattaagtgcattatacagattcgtaattggtgtttttgttccatcatttacagtcgcgaataataaatatggattaatactatctgctcctaatccatatagcgtgacaatgtcatgtaaggagcgaagggcaccagaacgtataacgagagaacaattgcggcgtaatttattttcacttaatgcttgatgtactttagcagtaactaaatgtggatcaatccacaatctttcatttagatgggcttttacgtcatctaatactagtagggaagcaccattgttaacagcagctatcgcttcagaactaatgcggcttaatgcacattgtagagtttctgacgagctgaatgtagcagagattgtggcgatagagttatgagttttaaatagctctatgagttgttcgtacgtaattgtgtgtaattcctctgcaataggttgtgccacgctgccttctaaaataattggtgaaagcatttcaactagaaatggccgttttgcgccgcttaataaacttggacgctctccaagtacagtacgtgtagagaagtgttcaatttcacggtcacggtcaattgcagggtttgtaacaacagctacactttctttaatgaagtcagcgatatttcgtctatcagtatcaagtgcggcaagtggtgagtcatgcccaagtgagcgtattggctcaacgccttttgttgccatctgttcaaggagttgaatatgttctcggtcccatccgaaagcgacgtattgtttcgtttcaacttgaacagaatcacatagcccttggatttttttcgtttcagggatagataaatttaaatggtaattggtagtatcaattcgctttttaaaacggttatatacttggatttgatatttgtcatattcataaagaacaagttcatcttgttcattccattttaatccgactttttctccaggagcgagtggttttggttctgctacatatttagttggtgatacaactccaggttcagaagagaaaatataagagctctctgtctctactttccatactgggcgtaatccaagggaatcaacgctgaaaacagcttcatctttaaaacgggaaatgatgccagctggtccttgggcaaaatgtccccacgcttcacgtatatacgtatataaatcttgtaaaggtgtttcataaagtttaatttcattaataattggtgggaatagaatttccattgcttcaaataagctgtagttgtattgaacaagtagggtttctaaggtgcggtttaaatcttgagagtcactgcctcctgcagtaagtggtacatcaatcatttcagcttgatcgcgtaatttcgcaattgtgttaatttcaccattatgtccgagaatgctaaatggttgtacacgaaaaaaattagataatgtattagtagagtagcggttatgtcctaatgtcatagttgaagcgataagcggatgttgtaaatcattatagtaggcaacaagcgtatcaccagcacctagaactttatatacaacatgattacgacttaatgaagcaacatgaattgcttcgttttcctctatttttattgtgacagaaaataatgtttgctcaatatttgtaatttcgttttctgcgataagggcaacttgccaaaataaaggttcttcttgtttaccaagtggaccgagtgcatctgagtttgttacatcatcactttcgaaaatgatagtaaagtttttgttgtttaattgcgtacgaatataatcttttaaggcagtaatgtcttcttttttatttagaaaaaaatgtccaacgataaagtggggatgatccacaatcgttggattatatccgctactttttagtttttcattccaaagcgtttttggtatatcaatgtgaatgccgatgccatcgccctcaccattaatgaaaccagctctatgattcattttgacgagtgattgtatgcaaaggtcaatgttttcttttgtagcaatttttcgtttctccataacggaaacgattccacacgcatcatgttctgcatttctataatctcgaaataaagacggtgtccatgtattttttttattgagcatccgtcaatcccccctcttgtaaaagttagaataatcttactatttaaggtgcgaatcaccttgtacacagagatagtaatgctgtaaaagagtataaaacagataattatgaataattatactattaatacggaatttatgaaatagaaaaaaggaaaaaagaaaggtgagctttcttttttccttttaatgacgggattatttattgtctgctagggcagcaaatgctctgccgacagcttcgattgtatattcaatatcttcttttgtatgttctgtagttaagaaccatgcctcgtatttagaaggtgctaagttaattccttcttgaagcataagcttgaagaatttaccgaacatttcaccgtctgtatcttgtgcggcatcgtaatcttcaattgtatttgttgtgaagtatacagttaaagccccttttagacggtttaatgtaatgtcgatattatgtttcgctgcttgttctaaaattcctttttcaagcattgcaccaagttcatctaatttctcataaagcccttcttgttgaagcacttctagacaagcgatacctgatgccatagaagcagggtttcctgccattgtaccagcttggtatgcaggtccaagcggagcaacttgttccataatttctttcttaccaccgtaagcaccgattggtaagccgccgccaataactttaccaagcgctgttaagtcaggtgtcacaccaagtaagtcttgagcaccaccgtacataaagcggaaagcagtaataacttcatcataaattactaatgcgccagcttcgtgaacaagttcattcactttttcaaggaatcctggtttaggctctacaataccgaagtttccaacgatcggttctacaaggatagctgctacttcatgaccccatttatctaaagcctcttttaaagtttctacattattaaatggaacagtaataacttcttgtgcaatactttgtggtacgccagctgagtcaggagttcctaaagtagaaggaccagatccagctgccacaagtactaaatcagaatgaccgtggtaacaaccagcgaatttcatgatttttgtgcgacctgtataagcacgagcaacacgaatcgttgtcatcactgcttctgtaccagagtttacgaaacggactttatctaatgcaggcattgcttcttttaacatttttgcgaattttacctctagcgctgttggtgttccataaagtaccccattttcagcagctgttgtaattgcttttgttatatgcggatgagcatgtccagtaataataggaccgtatgctgctaaataatcgatatatttatttccgtctacatcccagaaataagcgcctttcccacgttccatagcaacaggagcgccgccgccaactgctttaaaagaacgagaaggactattaacaccgccaacgatatgctctaaagcttctttatgtaatgcttctgactttgtgaatttcactacaattcatctccttacaaaaatctatgtattattctaacatgtttttcgaaaagacgtattgtttgtgatagcgaaggcagttgggtaaactattcgttgtgacatttaggaggggggtccgattatgaaatcggtaattgaggtacaagggttacgtaaagagtttacagcctattcaagtcgtccgggcttaaagggtgcatttcgcgatttattaaatcgtaattataaaatagtaccagcagtaaatgatgtatcttttactgtaaagcaaggtgaaatggttggttatatcggtgagaacggtgctggtaaatcaacaacaattaaaatgcttacggggattttaactccgacatcagggcaaatcacagtaaatggaatgaacccacataaacaaagagaagaatttgtaagaacaattggtgttgtttttggacagcgttcgcaactttggtgggatattgcagtacaagaatcgtttcgtttattaaagaaagtgtacggtgtatcagacgctcagtataaggagcatatggagcacgtaattgaaacgttagatatagggcctttattagataaaccagttcgaaaattatctcttggtcaaagaatgcgttgtgaattagcggcagccttaattcataatccaccgttattatttttagatgagccaacaattgggttagatgtacttgtgaaattgaaaatacgtgaatttttaaaagaaatgaatgaacgttataaaacaacaattttattaacaacacacgatattactgatattgaagctttatgtgagcgcgttatcatgctggatgaagggaatattatgtatgacggttctttaagtaatcttcgtacgcagtggggagcagagaaggaaattcactttcagtttgttgcaccagtttcctatcaggctttatcaatggttatgccagataatcatgtcgtttggtcgaaagcgaaagaggaaaatgcatgggttgcaaaaattccgaatgaagaagttattatttcaatgcttatttctaaagtagtacaagcatttcaaattaaagatttaaaaattaacgaagtgtctacagaggaaattattcgtaacatttatgaagaaggtattacgcatgggtaagtatattgaaatgattcgaattcgctttttaatgatgcttgcgtatcgtacaaattactatagcgggattttaatttatacgattaatatcggtgcttactattttttatggcaagcaatttatagcggaaaagagaatattgaaagtttatctatttcgcaaatgaccacgtatatcgcaatcgcgtggatggcacgtgccttctattttaataatatagatagggaaattgcgatggagattcaagaaggacgtgtggctgtagaattaattcgtccgtataactatttgggaatgaaagttatgcaaggtcttggcgagggaatattccgttttgccttcttttccattccaggcatggttatcgttacgttattattttcgttgcaaattacaacgaattttcaaacttggttatatttcttcttatctttaatatttagctttattattaatacacaaattaatttaatgacgggaatgcttacgtttttcctatttaataatagtggaattatgtatgcaaaacgcgttgttattgatttattttcaggtctattattaccaattagtttttatccgttatgggcccaaaaagcaatgatgtttttaccgtttcaggctattagttatattccaagtatgattttttctgaaggtatacaggggagtaagttgtatgaggctttagtatttcaagtgatttgggcgattgtacttattattccaattgtactcatgtggagaacggcgagaaaacgtctaattgtacaagggggatgatgagatgctatatataaacttatttttacaatatgcaagtcaatatataaaaacgaaattggagtatcgaggcgattttatcgttggtttactttctgatttatcgcttcaagcagttaatttaatatttattctcgttgtatttgggcatacacaagcattgaagggatggagtcgagaagaggtaatctttatttatggtttctttttagtaccatttgccatcttttcagctttctttaatatatgggattttaatgatcgatacattattaaaggggagatggatcgtgtattaacgcgaccgatccatagcctatttcaaattatattagaaagaatggaacttgaatctttaattggagctattacagggattgttgtaatgggatatgcagctgtggagttacaattatctttttactggtatgatttcttcttatttatattgatggtaggaggaggagcacttgtatatggagggatatttgttacgttggcgagccttggtttttggtcggatgcgaaaagttcaattatgcctcttatgtataacataggtaattacgggcgctatcctgttaatatttataatcgtgtaattcgtttcattttaacgttcgttttaccgtttgcgtttgttggagtatatccagcagcatactttttaagaaaaacagaatggaatagttatgcatttgcgacgccaattgttggtattatctgttttacgattgcaatcaccctctggaaccaaggggtaaaaaggtatcgaggcgcgggtaattaattatagaagcttgttcgtttctaagggataaatcagttctccacctcatacatataaaatgaggtggaggacatgttatggggatttattctattaattgcagcaatcgctattttgaaaagtgtccaattattatggagttcctattcggattcaacgcgttttttttcgctctataatttggccacattatttttaatctatacaacagtactaatcgcatttggattaagttacgttgtattagaggaaatgggtttcgcagttttgaaagaggacggagaaagtttgaacgctcattcttttcaactcgtcgaagtttgtttatattttagcgcagttactttattgtctgttggatatggtgacatatctccgattggaattgggcgatggattgcaatcgcagaagcgctaattggatatacactcccttttgcttttgtgatgaggtctgtaatagacaatgaaaaataaggaagcatttgttatagtaaaggaaaagagtaggagtgataactatgattacagtaggagaaatggcaccagaattcacattagagggaagtaatggagaagaagttcgcctagctgatttccgcggtaaaaatgtagttctctatttttatcccaaagatatgacgccaggatgtacaactgaagcatgtgattttcgtgatgcgtatggagtatttcaagagaaggatacggttattcttggagtaagtcctgattcagcgaatagacatttgaaattcattgagaaacatgaattgccatttacacttttagtagatgaagatcataaagtagcagagttatacgatgtttggaagttaaaaaagaactttgggaaagagtatatgggaatcgagcgttctacattccttattaataaagacggtgaacttgtaaaagagtggcgtaaagtgaaagtgaaaggacatattgaggatgttctttcttatataaaataaatctacattggggataaaatatgcagaaacaaggcaaatgtctatacatattttactgccttacataaagtggaagtgtagggcatacctcctcagatgatagtattccaagtgcgattatgtcgcacttttttctatggaatatatgaagaaaaaagggaaagatacataaaaacaagtcctgaatataaaaataaactacatacttatagtagaaatattgacgatttataagaaaaggagtacactctttataagaattataaaataataatccgtatagaatcggggtgcatgacggtggtcaaagaagaattaaaagaagcgctagaaatgctgaaaaatacgggtgtacgcattactccacagcgtcatgctattttagagtaccttgtggaatcaatgacgcacccaacagcggatgatatttataaagcattagaaggtaagtttccaaatatgagtgttgcaactgtctataataacttacgtgtgtttaaagaggttggacttgtaaaggaattaacttatggagacgcttcaagtagatttgattatgttacaagtcaacattatcatgtgatttgcgaaaaatgtggtaagattgttgattttccttatggaggcttggaaaagctggaagaggaagctgcgaaaacgacaggcttcgttatcaatagtcatcgcttagaaatttatggcgtttgtccagagtgtcataaggcgtaatatataataaagaaagaggctgacggctatacgtcagcctctttctttattatataaggattagcgtgaggttaatcgggatttacagtgctaagttagtaaggagggttagataaaagtttgtcgaatttactttgtattggtggaaatgaattctgggaggggacattttgaagaaatatgagattaaaaataacattccaacattggaagaatataaatatttatgtgattctgtgggatggactaactatatgaactttgaggtggcggaaatatcacttcaaaattcgatttactgtataacagtcaaggataataatcaaatcatcggcatggggagaattgttggtgatggggctatctatttctatattcaagatatagtggttcatccagagtatcaaaagaatggtattggaaagaaaataatgaatactttagtagaatacttaaatcagaatgctccagataaagcattcattggtttgtttgcgtcgcaaggtaaaacatcattctacgaaaaatatgattttaaagattattcgcctaatatgacagggatgtttactgttatttcgaaaaaataggtgtaataaatttaataaaacaattaaaaagttgattttttaagaaatcaactttttaatgagttgaaacgtttgtagtgttgcaaattcgtatttcccttgatacttatgatttataactcttcttattatacttttcatcaaattcttttccttctagatctcgatctagtgttaaaggttgattgcagtgcatacatgcatcgacacggccgagcattttggttggcttatcacagcttgggcaaataatttggatagtcttagtagataacataccaatccaaaagtaaacgacagtgctagcgataacagctaaaaagccaaccatcataaacgttgtcataataataatgttttcgcggaaaaagacacctaagtatgcaatgaagaggccgataaatactaaacttaatgcaaaggtccggattttattgattttgtttgaatacttaatgctcattctcaccacgctcctatactaataatataacataaaatttagaattttcactctcgtgtaaattgataaagggataagatatgaaatgaataggaggggggccatgaagaatgaatggacgctataaggatttttacagcggtttttcagtttttaacgggatgtgaaatttttttataaaaagtattgaccctgtatatactgcatgatatattaataaccgtcgctgatgcggaaacgcagaaaacgacaaaaaagaaattaaaaaacttagttgacattgaaaaatgaagatgttaacataaggaagtcgcgaatgagcgactaagtagttctttgaaaactgaacgaaacaaacaacgtgaaacgtcaatttttattttagatgctagacaaactaaccctccagataaaacagtattgagtccatcatatcagatggactctttttttactgtctacctataggggataataccagaaggttgatatggtgtctcttttttatgaacctggagaggtttgaactcaagaaattaattctataaattttatattatgattttttggtttatgacatacagctagttgtaacagaggaggtactgtattctatgttttcttatgcggatcctataacgtagaaaggtaaaatttctggaccagattttaattagtgttccttcagctttaatgaggaggtgtacgaagatgttgtgactatacctgctgggtattattaattgtgaagtcaaataagaaaacaatttattagaggaagattagttagtttaagtatcagatttaggtgtttaacagggggtactaattaatttcagttctttcatgaaaaattatagaaaaagtatggataaacaaattcttgttttaagtgaattttgtgaatgtgggggctgctttaaataaagatggtcaaacactatgtaaataattaggaatgttaaaatatgcaaaattgcatattaaatattttaaatcttatgctaaccttataatgcgaaatataacatttgttggtaattattcatttttgaaagataaaaaatgaataattacagtgaattgtataccactgtcctatagtataaacgataataacgaaagctatttgaagtcctttgaaggaaataagttattgaaaaaaattccatatagaaaatttgttgaaatttcagatgtaacaaatgtcattttatttttaatgtctgataaaagcgatgccattagagggcaaaatattgtggttgactatggatatacaattgtataaataaatcatcttgggaattaagggtgtggataatgagtttactaattaaagatttaacaaagaaatttgacgagcatgttgcagtggataatttgaatatcgagataccaaaaggtgaaatatttggattcttgggcgggaatggagcaggtaaaacgactacatttcgaatgatacttggacttttatcgaaatcaagtgggaccatttcatggaatggtaaacctataaattatggtgttacagataaaattgggtatttaccggaagaacgtggtctttatgcgaaaatgactgtcaaagaacaagttaacttttttgcaaaactaaagaacatgaaaagtaaagatgcagaaaaagaacttcactattggctggagcgttttaatattactgagcatctgaacaaaaaggtaggagaactttctaaagggaatcagcaaaaaatccagctgataacagcgattatacataagcctgaactcttaattttagatgaaccatttagtggtttagacccagtaaatgttgaaatgttaaaagacgctgttcttgatatgcaaaaacaagggtcgtcaattctttttagttcacatcgtatggaacatgtggaagagttatgccaacacatttgtattatgcacaaaggtgtacctgttgttcagggtgacattgccaaaattaaaagtgattttggtaaaaagaacgttgtaatcgttggcgatcatgactttgaccatttgaaagaaataaaaggtgtagaaagtatgaagaaacgtaaaaatgcagttactcttaaaatttcatatgaagaagtgtcacatgttttatttaaagagataacaaaattagggtatgttaaaaagtttgcagtagaagagcctacattaaatgatatctttattgcgaaagtaggtgcacaaaatgaatagtttctggacaatttttttacaaaactataaatctaaagtgaaatcaaaatcatattttgctattacaataatagtttctatgttaattataggattgatgaattttgacaagatttataacttgtttgcaggtaacgaggacgatcaagttgttgttgttacagaaaaagaagaattatattcaaccattcatcaagtgtttaaaaatgtcgatagtaagatacaagttaaacgtagcacggataaacaaaaagcagaatcaggtgttaaaaatggtgattatacatatgcaatcgttgtagaggaattgaataataaacaattaaaggctacgtatataactgagacggatgtaaatcagcaagatgttagcaaggttcaaacgattttatctcaaatacaatcttctaatttcgcccagcaattgaatctatctcaagatgaattaaaggtgttaacaacgccagtagaaattcataccaaaacggtttcagataaggttaaagatggagaacatactgagggtgtagggattttaattaatgtctttatcatgctaaattatctaatgatattaatgtatgctgcacaattagcaacagatgttgcaacagagaaatcttctcgtgttatggagttagttgtttcaagtatttcgcctaccaaacatttatatgcaaagctattctcaacattattggctggtattacgcaaatcataatttggggcttggtcgcaactgttggatataaaacagcaattaatgattcgaaaaatgatattttaaatagtattgatttaaattctgttgctccaactctagtgttttatgggattctattcttcacattaggattcttattatatggctcattatcttgtctatttggctctatcattacgcgtatagaggaatcttctcaagctgttatgccgctgatgtttatgttacttgctgctttgtatatagcaatttatggaatgtcaaacccaagcagcatggttgttaccattactagttatgtacctttcttcactcctattgttatgcttgtacgaattggattcctcaatatcccagtatgggagattgcgcttgcattagcaattctaattgcaacaatatgtatgatgattggtttaacgagtcgtgtttaccgcggtggcgtattaatatatggtaaaggtgcatttagtaatatcaaaaaggcaatcaaattagggcgaaaataggattcgtctattcatttctaaacttaaatttacaaagatctgcatagttaaactgtgtagatcttttttgttgagaaatttatataaataaatataaaaattgctgtattaggctatttttcaaagagaattttaaaaagctcccaaaagagagtaaagaatcgagttctagcgaacaacgtagagcgataattaatataatttatgtctttctccaaaatggagaaaagaagtagggaaaaatttagttttaataataatcatttatttgctacataaagaaaaccccttgactatcaaggggtttttcatatgaccccggagaggctcgaactcacgacctccaccctgtcaaggtggcgctctccctgctgagctacgggatcccaactataaatgttaccatcagcaatgtattttcatttcattcgtgtaatcggagaatttgtacaatttgttgagtattgtaacatttgatgtattcctataatagcaacaaactttaatggtgtaaaggtttaattttccgaatattcatattctaatttttgtataaaaaaataagccccgaagagcttattttaataataatatcaacgcaattatcaatgatattttcaaaaatacaatcataaataatggagcttgttcataagctatcgtcctgtaactgtcattcctgctgtgtaaattgtatcaatagaaccgtcagcgccttttatttcgactttataacgatatgttccatcttcataaatatcatcgccatatcctgtgaaagttgcaatttcatcattgcttccagctgggacccattgattttgccaacggaagttggtttcaaattctccccatctatcgccatatttcttttcaaggctgacattgtaatgaatttcttcagctcggtcatttgtaattcttgcaattacgctgttaccaaaagtaacttgtgtagagtgtacctgaactgtaacaccgttcaccgtttcaccaggaccacaaatgtaatgacaaccatcccattcgtcagcatgtgcttttggtgtatcaatgttcataaccgttaaaccgcctaaagctaatgcgccagttaataatactttacaaaatgttttcacttgaaattccccctaagtatattctcaattcgttcgatagatatcacattaatctaatggaacgttttttccttaagtgtattcgctatgaatctttcatcttgtagtaatctaatcactacataaaatttcatagttttgattccatatatgtatcatgatttacatagaacaaatctgttaatacgttttggttatttgcttatcccactacttttattaccttttattggtaaaacgttgatttaattatataccattattatctatttacaagagaaaacaatactgtatgcaaaaatgcataatacaagcagtgttgggtttcgattaatatttgagtggaatctaatgctaattttttatgtttaacagtataaatctatcaatgtttattaaagtcataattgataaacattgtccagggggcgcccttcatgctgagatacaggatcttcaaaagggaaagtataagcgattatgctcgtaatgtatgaagggataatgatgagaagaaaattcagtagaaaatagtttttgaatgtagctgttatattatttccggtatttatctaaaggattttcatcgcttaaatcaacaattaaagggcataaaaataacagtggtaaagcggcgttagcttgatgaaaagtatcattagacatatattgcctcccaaaacaatacggacaatctttttcaaatgtcacgagtatcgaccatatgtcttttactttccacttctttttacaatacgtacaacgcgccattgagttcctcctcagtttaaggtgttttctaatatattctactttattgtacgaaagtcatttgaatttgatgtggtaaaatgcaaaacaagcctaacctcgttctacacttagggaggggttaggcttgttttaattccgttcaaagcctctttgtatcaggccgtttatacattgcctagatagcttcgcgttaaattcgggagaataatttttccatctttactgtatttttcgaatagctctgataggagaaaaataaagtttttatactgttcgtcattttctttcggagcataagacgctgatagatttcttcccaaaaacccttcataatcaaaaagtaaatcattttgatattctttaaactcatactttccatctttaaaaaagctgttaaatacttctggagtttcatctattccaccgctaaagcctttaaagtttgggcaggttttctggcaaatttctgcattctctttaataagtggactagttaaatctctgctattccaaacaagtgcaacatttgctttttgttttaaaattcgttggcattcgattttgaaagcttctttatcaaaccaatgaaatgcttgggcaacagttactaaatctacactattttcttttaaagtggtattttcagcagttgcttttatggattgaaaacgagaatatagttttaacgattgctcagccatcttcctcatatcatcatttggctcaactccaataacatgtaaaccactttcaagcagctggcggctaaatatccccgtacctgaaccaatatcagccacaatccgattccctttcacttggttagctggaagcaagtaatcaatatattcattaggataactagggcgatattttgcatacatatcggccctgtcagtaaaattttctgttgttttcacagcactaccttctttcttccgatattatgtacagaaatagaaattaaatatgaattccggcattagtctttaagtctaccacttaagagtccagctaaatagaaggcctcagtttctttattcaaatatcctttatccgtttagtatactattttagataatatcttccaaaagtttataatggcttactcaactaaacccacataactgacgttgtttaaacaacgtcaattatgttttagactgtatgtttttatgaatttatttaataatgtatgagcaattgtatgtcgtattacgtttacataggtaagagattttcatttttgctatttaaattggccaatatatcctttttacaatttactgaaaatcatgtataacagagatacatgattattttatctcgctatttgcgggcagtaagatcccttacctcgaaattcagcaaaagtaaagaagttaggttcgggtcggaatgcccgtaaaagtccgattcgtgagggttgatgaaagtttcactttataaatattcagaagtagagggagaaaagttgtaatggtaagaaaaacgttcaagatgcgcgtgtctaaaaatagaacgatttcgattaatggatcgattcttgatgtggatgttacacatgatgaatttttacaagagtttgttgagtgggttgattctaaaggttggtcgtttatgggaataacagatgagattacgcccgaggaagctagtcaaaagttaatagattcgttgattgatgagaaggataagaaagagtaattccttcttatttttattgtatatttatgttctttatcgtaaaagtatgatatagtaaaaaatagtgaaatttcttccaatataatacaaatcacatatgattggtagatttattattttgttaaggagtaaatggaaaagggagagtcatatggtaaattttaagaaaattttggtttttattacagttatttgttcgttttttttgacgcccataacattgcgtgctgagacgaatattggagtaaatccagaacaagttgcaccaccacctgcggaaggaccgaatgtttttagtcagtttgcaacgacaattgatgcgaaaacaggagatgttttgtatgataaaaacgcatatcaccgagcatatcctgctagtacgacgaaggtgttaacagcgattttactcatggagcatacaaagccagaggaccaatttacattttcacaattagcattagatcaagagaagagtaattatcaaattgagtttcaacctggagagacaattaatagaaatactgcgcttatgattttaatggtgctgagtgcgaatgatgtgtcgtatgcgattgcggagcggattggcgggagtgttgagaatttcgctaatatgatgaatgagaaagcgaagcaattaggagcgaaagatagccactttgtaacaccgaatggattgcatgatccgaaccattatacgacgccgtatgatatggctatgattacgaagggtgtgcaaaagtatcctgaaattttacaagcgatgaatacgaaaagaacgacagttacgacgtctaggcagacggtgtctatttttaataaatctaatttttttgaaaatccatatagcattggcggtaagacagggtttacgaatgaagcacgtaatacacttgttttattaaatgagaaagatggaaatcgtattataagcgtagtaatggcttctcaaagacctgaaatttatgaagatttgaagcagatggcggaatattctttcggtcaatttacgaagcaaatggtgcttgataaacataattggcatcaaaaaacaacatatttaaataaagatgttaattctgagttggaacaaagtgcggagcttatgcttaagaaagatgaagggaaaaatgtgaaaactattttccgggcggcttcattagataaagaatctttatatcataaaggaatacatcgtggtgaggtagttggtgcagttgatattacgaaaaataatcaaacaattgcgacggtaaatgttctttcaacagaagatgtcacttttacgatgcctaaaaaagatacaactatgcctgaagtaaaagactcaaatgtgaaagtaataagtgttgggataggtgcgattatattatttggagcaattttatatgtagtgttgcgccgaaatacaaaaggaatgaaatcagaaggtaaataaattactaataaaaagactgtgtaaaattttggcacagtcttttttctatattttaaataactaataattgtaaattttcttattgcaataacttaaagttcgttatatcatttacttgtgttcttgttaaagaacgtaagcggatattgcatacttcaaataatataaaacaacggagagggagagagacgatgaaattaatatggaagataattagcaacgcgatctcatttgttttatttgcattgatggtttttttagcttttgtagttatttcttcaaaagcaagcggtggtgatccgacagtgatgggatatcaatttaagagcgttctttcaggatcaatggagccgacgtttttaacaggatcaatcattgcaatagaaccaaacaaagatggttctaaatatcaaaaaggtgatgttattacctttaaagagaaagatcaaaaaattatcactcaccgtattatcggtgtgaaagatacaaatggaaaagtaatgtatgaaacaaaaggggataacaacaacggaccagatttagagccagtacttgcagaaaatgtagttggaaagtatgcagatattacagttccgtatgttggttatttactgaattatgcgaattcaaaagcgggagcagcattacttcttattattccaggagtctttttacttgggtattccgcgatttctatttttggtgctattcgtagcattgacggagaaaagaaagataaaaaagtagaacaatccgtctagttcgtttggttatactttccgtttaggaagttaacaaatatatattaaggggatatggacatgactttaaagaaaaaattaggaatgggtattacatcagcagtattaggagcagctttagttggtggaggaacatttgcatttttcagtgataaagaagtgtcaaataatacatttgcggctggaacactggatttagcattaaatccatcaacagttgttaacgtatcgaatttaaaacctggggatacaattgaaaaagaatttaaactagaaaataaaggctctttaaatattaaaaaggttctactgaaaacagattataatgtagaagatgtaaagaaagacaataaagatgattttggtaaacatattaaagtaacattcttaaaaaatgtagataagcatgagacaattgtgaaacaaactactttagataaattaaaaggtgacacacttacagctgtagataatgatttatcggcttggttctgggatgaaaaaggtatttcagcaggtaaatctgataaattcaaagtgaaatttgagtttgttgataatggaaaagatcaaaatcaattccaaggcgacaagttacaattaaattggacgtttgatgcacaacaaacagcaggtgaagaaagataataagaaaaagggctatcacatggatagccctttttctatttttctagtatttgtctatcaattttaatagttctttactataatatagataatgttctgtataaagaacgtaatgttcgatgggagagattaagatgctgaaaagaccgcgtaattttaaaaagatgcttatattgccgtgtatgtgttctattacgttttatttaggatctcaaattatgacgcatacagaagcggcgttcattcatgaaacgaaagtagaagcgacgctttctacagcaattatatttccgaaaacagttaatacgttaaaagagcaatctgagaaacataaacagtttattgagcgtgagtatggaacgatgaagggaaaatcgaaagcaacttctattgaagaaataaaacaggcgatttctgtatggcaacaagggcgtgagaaaattgttgctgagaaggaagccctgcaaaatgtatatactgaaatagaagctccttacaatcaaatacaagaagaattaaaggtaaataaagatgagtcgatgcagcaagtgtccatatatgtaaatgaaggcttccgcagtatcaaagagaagcgtgactatattgagaaagaaattagcttgaaagctattgatgagcaaattcaggctcttcagcaacaattaaacgttgcaattgaagcggaaggacaaaagaaagccgaagaacagaagaaagtagaagaacagaagaaagccgaagaacagaagaaagtagaagaacagaagaaagcagaagaacagaagaaagtagaagaacagaagaaagcagaagaacagaagaaagcagaagaacagaaaaagctagaagagcaaaagaaagcggagtaactgctttagtgaaacagccggaaaacaagaatgtggtgtaagagagagtgaacgaataagcaagactagtaatatttatacgagtgtgagggaacgttagccctcacctctttgtttttcttttttcttatagtattaaatgatttgagtgtgaaaaaagttataaattatcattgtttttttctgaaaagtctaaatgatattgagaaataaaaataactgaaaatattaataaatatgtgttgtgtttatatagggttgttcgttataatgaacataaggtttttaaaaaagaacacatattagctaagctaatatagttttctttacatctcttattgaaaaataagtgataaaaatataaaaaaaagctagggggaattgattgtgagtctgaaaaagaaattaggtatgggagttgcatcagcagcattggggttagctttaattggtggaggaacatttgcattctttagcgataaagaagtatcaaacaatacatttgcagctgggacgttagaccttacattaaaccctaagacgcttgtagatattaaagatttaaaaccaggggattctgttaagaaagagttcttattacaaaacagcggttcgttaactattaaagacgttaaattagcaacaaagtatactgttaaagatgcaaaaggtgataatgctggtgaagactttggtaagcacgttaaagtaaaattcctttggaactgggataaacaaagtgagcctgtatacgaaacaactttagcagacttacaaaaagttgatccagatcttttagctaaagatatctttgctcctgagtggggagaaaagggtggattagcagctggtacagaggattatctatgggtacaatttgaatttgtagatgatggaaaagaccaaaatatcttccaaggtgatacattgaatttagaatggacattcaatgctaaccaagaagctggggaagaaaaataataaaaaaagcgggtattcccgcttttttttataaagaaaaagaagtgctggttgtaagcacttctttctattattatttttgattttgcttccactttgtaaattcaagaaattcacgaaattgttctttggagacaccagagttcattgcatctttaacgagttgtgtccattcggagtctaggttagtttcctttgttgtttcatcatgaagtaaagtatcaactggaatttgtagaactgctgcgatcttttcaagaaactgaatggaagggtttttttgtaaatttcgttctatagaactaatgtaagatttagcaacgccagctttttcggcaagttcagttaatgaaatccctttttgtaaacgaaggcgttttatacgttctccaatcatatttgcgcacctttctatcaatatgtagttgtcttatgatgttattattataacataaacttcgttaaaaagaacaaacctattgagcctgactggatggcttcatacgttggaaaaattgctcgatgtcttgcatggcgataccggcatctagagcttcaagtattaaatcaatccattcttgatccagtgcgtctgtcttatctttgtacaaatgtaattcctccctaattatcggtcataattgctgctacagaatacatgataatgaaatccgattttgtgttttatatagtgaattatcaaatattgtgtagatgaaacaaagataaaatccccattaaactccctctatggaaattataaattgttcgataaaaactttcaatattttcagaaaacattgttgaattgtgatatattcgtatgctaactatgaaatttttacaaatatattaaaaacattacataatatgactaaatattgaaaaaatattgaatttttaataaaatttaatttgtaatacatattatttattaggggaggaaataagggatgaacaagaaaccgttcaaagttttgtcatcaatcgcattgacagctgtattaggcctttcattcggagctggcactcaatctgcatatgctgaaacgcctgtgaataaaacagctacgagcccagtggatgatcatttaattccggaagaacgtttagcagatgcattaaaaaaacgtggggtaattgattcgaaggcttcagagacagaaacaaagaaagcagtcgaaaagtatgtagagaacaaaaagggtgaaaatcctgggaaagaagcagcgaatggggaccaacttacgaaagatgcatccgactttttaaagaaagtgaaagatgcgaaagcagacacgaaagaaaaattaaatcaaccagcaacaggcacacctgcagcgacaggcccagttaaaggcggtctaaatggtaaagtaccaacttctccagcgaaacaaaaagactataacggtgaagttcgtaaagacaaagtactcgttttacttgtagagtacgctgactttaaacataataatatcgacaaagagcctggatatatgtattctaacgattttaataaagaacattatgaaaaaatgttattcggcaacgagccattcacattagatgatggaagtaaaattgaaacgtttaaacaatattacgaagagcaatctggtggtagttatactgtagacggaacagttacaaaatggttaacagttcctggtaaagctgctgattacggtgcagatgctccgggcggaggccatgataataaaggaccaaaagggccacgtgatttagtaaaagatgcattaaaagcagctgtagatagtggtattgatttatcagagttcgaccaatttgatcaatacgatgtaaatggtgatgggaataaaaatcaaccagacggtttaatcgatcacttaatgattattcatgcgggtgttggacaagaagcaggcggtggtaaattaggcgatgatgcaatttggtcgcaccgttggacagttggaccaaagccattcccaattgaaggtacacaagcgaaagtaccatattggggtggaaagatggcagcattcgactacacaattgaaccagaagatggagcagttggtgtattcgcacatgaatatggtcacgatttaggtcttccagatgagtacgatacacaatatagtggtcaaggtgagccgattgaagcttggtctattatgagtggcggaagctgggctggtaaaatcgctggaacgacgccaacgagtttctcaccacaaaataaagagtttttccaaaaaacaatcggtggtaactgggcaaatatcgtagaagtagattacgagaaattaaataaaggtatcggtctagcgacatatttggatcaaagtgttacgaaatcagcaagaccaggcatgatccgtgttaacttaccggataaagatgttaaaacaattgagccagcatttggtaaacaatattattacagcacaaaaggtgacgatcttcatacgaagatggaaacaccgttgttcgatttaacgaatgcaacgagtgcaaaatttgatttcaagtcattatatgagattgaagcaggttatgatttccttgaagtacacgctgtaacagaagatggtaaacaaacgttaattgaaagacttggtgagaaagcaaatagtggaaatgcagattcgacaaatggaaaatggattgacaaatcatatgatttaagtcaattcaaaggcaagaaagtaaaattaacatttgattacattactgatggtggtttagcattaaatggattcgctcttgataatgcttcattaacagtagatggtaaagtagtattctctgatgacgcagaaggtacaccacaattaaaattagatggtttcgttgtatctaacggaacagagaagaaaaaacataactactatgttgagtggagaaactatgctggggcagataacgcgttgaaatttgctcgcggtccagtatttaacactggtatggttgtatggtatgcagattcagcttatacagataactgggttggtgtacatccaggacacggtttccttggtgtagttgattctcatccagaagcaattgttggtactttaaatggtaaaccaacagttaagagtagtacacgattccaaatcgctgatgcagcgttttcatttgacaaaacgccagcttggaaagtcgtatctccaacgcgtggaacatttacgtatgatggcttagcaggcgtaccgaagtttgatgattctaaaacgtatattaatcaacagattccagatgcaggacgtattttaccgaagcttggtttgaaatttgaagtagtaggacaagctgatgataattctgcaggtgctgttcgtttatatcgttaatactgtaaaactaccgagagattttctttcggtagtttttttgtgagcaatgaattttatatagctgaaaaagtcatatataatgtaaccttaagaatagaaatttgttatatatgaagtttatataaataatgaaagaattggataaaaatagtgggagaaggtgagtgaatgagtatttcctctattgtaagtaggcaaaaggaatattttttaaaagggcatacgagaagcatcgaaatgagaaagaataatttgaagaagctttatgaaggcattcagcgttttgaagaagaaatatttcaggcattgaaattagatttaaataagtcagttcacgagtcgtttacaacggaagttggatatgtattaaaagagatttcctttcaattgaaacatatgtcatcgtggagtaaaccgaaacgagttcgaacagcacttactcattttggatcaaaaggaaaagtagtgccagaaccgtatggtgtgacgcttattattgcaccgtggaactatccttttcaattagcaattgcaccacttgtaggagcactggcagctggaaatacaatcgttttaaagccgtcagagttaacgccaagcgtttcaaaagtgcttaagagaatgttagatgaattattcccggaagagcttgtagcggtagtagaaggtggcgttgaagagagtacatctttgctgaaggaaccgtttgattatattttctttactggtagtgttggcgttggaaaagttgtaatggaagcagcagcgaaacagttgacgccgctcactttagaacttggcgggaaaagtccttgtattgtacataaagatgcaaagatagagatgacagcaagaagaattgtttggggaaagtttttaaatgcagggcagacgtgtgtagcgcctgattatatgtacgtgcattcttccgtgaaagaaaagctaattgaggcactgcgacatgaaattacagagcagtatagtaaagaacctttacaaaatgaaaattacgtgcgtattgtaagtgagcgtcattttgaacgattatgtggattcttacaagatggtcaagtcgtaattggtggaaactatgagaaagatactttacatattgaaccgacagtactagcggatattacatggcaagatgctgttatggaagatgaaatttttggtccgattttaccaatcatagagtacgacaatatagaaaatgtaattggcacaatccagcaacatccgaagccgttagcgttatatgtattttctgaagataaagaagtacaaaagaaagtgacgagtaatatttcatatggtggaggctgtattaatgatgttgtctatcaccttgctacgccatatttaccttttgggggtgttggaagtagtggattagggggttatcatgggaaagaaagttttcggactttttcacattataaaagcattttagcccaatctacagcattcgacatgaaaattcgttactcttctacaaaaagtgctttaaaattcatacgaaagttgttaaaatgatgatggtgtttatcagtaggcgtagccgtatgataatagccccttcgcaatggaaggggtttttctgttcgacgttatgtatcaggcgaaaatgaatcaaacatactacataaagaatagaaacgaacgcttgctaaataaccatttttgtttggatcgaaacaaaaaatagtctatagaacataaatatttattcatgaatataaaaatttaaaatttaaggtagataggacgggaaaatgaaaaagattattaaagttgaagcagttgaaaaacattttggaaatcaagtgattatcccacctctttctttagatattaaagagggagagtttttaacaattttagggccgagtggctgcgggaaaacgacgttacttcgtatgatcgcaggatttgaaactccaactaaagggaatcttttattagatgatgaaagaattaacgatttgccgccatataagcgtcatatgaacctagtgttccaacattacgcactattcccacatatgacagtagagaagaatatttgttttggtatgaaaatgcagaaagtatcagcagcagagcagaaagagcgtgctgaagaggcaatgcgtttaacgcagttacttgagttccgtaatcgtaaacctgcgaagctttctggtggacaacagcagcgtgttgcaattgcaagagcgattgtaaataatccgcgtgtattactattagatgagccacttggagcgcttgactttaagttacgaaaagacttgcaacgtgaattgaaaaacttacaacgtaatttaggaattacgttcatatacgtaacgcacgatcaagaagaagcaatgagcatgagcgatcgtattgtagttatgaataaaggacatatcgaacaaatcggaacaccgaaagaaatttacaataagccgaaaacattgttcgttgcgacattcatcggtgaaaataatattgtgaaaaacggggaaggctatgtagcaattcgccctgaaaatgtaaaagtacgttcggttgaagagtcaattttaaaagaataccatcttggacatattgaagatatcgagtttgtcggaaatatggagaagctttatgtacgtgatgagaaaacatcagaattactaatggcatatcaaactgctgaagaggcagcacagtggagcattggagataatgtatatgtaggctgggagcaagaggacgaggtgaccttaaattgaaaaaagggaaattactcgcactacctacagtcgcgtggctgttaattttcttcctaatcccgctcgtattcgtattaggattcgccttcatgcagcgcggagcttacgggacagtagaaatgcaatttacgctggagaatatatcccgtgtgtttgatccattatacttaggaacgttatgggaaactgttaaaattgcagttattacaacagtaatatgtttattaattggttatccgtttgcgtatacaattacaattgttgaccgcaaataccgctctattcttttattattggcaacgatcccgttttggattaactttcttgttcgttcatacgcatggattgttattttacgttcacaaggtcttgtgaatacgttgttattaaagcttggcattattagtgaaccgttaaatttattatataatactccttctgtaatactcggaatggtctattctttattaccatttatgattttaccagtgtatgcagcaattgagcagctggataagcgtaagctagaagctgcttatgatttaggagcaacaccaataaaggcattttggaatataacagtgccgatgacgatgtcaggaattgcgactggttctattttagtattcgtttcttctatcggaatgtttgttgtatcagacgtgatgggcggatcgaaagtagcattaatcggaaacgttattcaaaatcaattcttaggtgcacgtgactggccgtttggatctgcgttatcgattatcgttgttctattctctgttctgttaatttacttatattatcgtgcaacgaaagtatataaatataatgagaacggaggggaataggcaaagatgaagaagtttttagtttcttattcttggttaattttgttattcttgtattttccaatgatggttttaatggtctattctttcaacgactctcgcattaatgcggagtgggaaggttttacattccattggtatacagatttatttcaaaaacaagatgttattgatgcatttgtaaatagtattacgattgcagttataacaacgattgtgacaacggtacttggtgtattctttgcaatcgctttacatcgttataaatatcgttttgaaggggctattaatggccttgtatatttaccaattttaattcctgatattttaatgggattatctttactaattcttttcagccagttaggaatggaacttggacaaacaacgattattattgcacatattacatttagtatttcgtttgttgttgttattttagctgcgcgtctttcaagtatgggacgtgacttagaagaagctgcaaatgatttaggagcaacgccttggcaaacgtttcgttatgtaacgttcccagcaattgcaccgggagttatttcggcagcattattaacattcacattatcaattgatgattttgtaattagtttcttcgtatcaggaccaggatcaacaacattgccactatacatttacagtatggttaagcgcggagtatcaccagaaatcaatgctctttctacaattttaattgttgctatcgtaggattaatggttctatctgaaatcttccggaataaaggtgcagatggtgaagaaaactctggaggacaccttcctttataatacgaacgatatagaaagtacaagggggtaataaaccgatgaaattaatgaaaagaatagctggcgcagcaattagttttagccttgttgctggtgtgcttgctggttgtggtgaaaagaaagaagaattaaatatttatagctgggctgacaattttgatgagcaagtgctaaaagattttgaaaagaaatataatgtgaaaattaactatgacaagtacgcaagtaatgaagaaatgcttgcgaaattacaagctggtggcgcaaagtatgacttaatccagccgtcggattacatggttaaaacaatggcgaaaatggacttattagcgccgttagataaaaagaatatcccgaatatcgaaaatatggtttctaatttcaaaacacctgcgtttgatccagagaataaatattctttagtgtacacttggggtgtaacagggattgcatacaataaaaagtatgtgaaagaagcacctacaagctgggcggacttatggaatgagaaatataaaggacatgtaacgttattgaacgattctcgtgaagtattaggagtgggtcttaagaagcacgggttctcaaacagtacgaaagacgatgcacaattaaagacagcagcagatgatttaaagaagctgcttccaaacttattagcatttgatacagataacattaaacaaaaattcattacagaagatgcttggatcggaacagtttggtctggagatgcagcatttatcgcaaaagataataaagatgtagaatatgttgtaccgaaagaaggcggcacaatttgggctgatacgttagcaattccaaaaggtgcaaaacataaagagcttgctgagaaatttatgaactacttactagatgaaaaagtaagtgtgaaaaactacgagtcaattggttacagtaatccaaatgaaaaagctcatcctcttcatagtaaagaataccgtgataatcacatgattttcttaacgaaagaagagttagatcgtacagaatggcttgttgatgtagacgataagttaaaagactatgatcgttactggacagagctaaaaacaaaaggtaaataagtaaggaaatgcggtttctaaagtagaaatcgcattttttcatagtaggaggaaatcgtttgaagaagaagttacatcagtatgaggtaatgtgtatcggtttgttatttgctgtatttggtattgttgcttggcgcgtacatgcaggtggcgttacagtgatggatacatatgtccgtggattagtaagagggctacaaacggaaagttctcttacatttttctcgtactttacaaaattgggatcagcaattgggatagtcgctacgctcgttataagtttgcttgttttttggaagaagcgttattatgctgcgatgattgtatatccaatgggaattttaataacacatcttgtgaataaagggataaaagagagtgtaaagagagaacgtccgtcattaaatgaagcgctagatgcacttggatatagttttcctagtggacatgcaatgctatcgattatgacatttggatttcttacttatatcattgctgctaatttgaaaagtgtagctgggaaatgtgtcacaacaattttgatgggtatagtaattttatcgattggattaagtagagtcattttaaatgtacattatccaactgatattttagctggttactgcgtaggtggtattttgttaattatcgcgatttactaccatcgtttacttactgagagattagggcttaataaagagagatagaaaaacgtctggaaaaactattattatagtttttccagacgttttttgtttatatcaagatgtgatacagtataagtgacaattgaattatttaaagtaggtgaaaatgtgtgaagacaaatgtacataaagttgataagtgggggaagttaggagcctttttgtatcagtttcgttataccgtaattgtaacgttactgttgctcgcaatcgcacttgggatttttgctccaaagctaccgggagtattaggtggtgacggtttccaaacggaaggcgactatcaaaaaacgaaagaaattttagataaagattttaagaagtctcaagatacgctgctgctcatttttgagaaaaataaagatgcttcgcatgaggaatttaaaaagcgaataaatgaaattgtaaagaatgttcaagagaaagagaactatgaatctttccatcacccaatccaaaataaagaaatgctacaagatgacatcggttatgcgacaattttattttccgggaaaacaaataaagaaagaatggaaaagacattacaatttgctgatgagattgagaaagaaagtaatgtagcattaaaagtaacacctacaggatttccgaaaattaataaagagattaatgaaagaacgcaaaatgatttaaaagtagcagaaatgattggattaccaattgcgtttcttgtattactattttcgtttggtagtcttttggcatcaattttaccgattttgaatggggcgcttagtgttattagtacgatggggatattgtatttcatcggtgttgataaagaactatctattttcgtgttaaatgttgcaccgatgattggacttgcattatctattgattttgcgctattatttgtgaaccgttttcgagaggaagttgctaaacgaacggtaaaagaagcgataacaattacatatcaaacggcaggacgtgcgattgtattttcaggattatgcgtatttgttggattatctggtttgtttttctttaagatagattatattcaatctgtcgcgattagcggaatgattgttgtcattatgagcattttattctcactcacacttcttccagcactattatcgttaatcggtaaaagaatattaaaaaagaatcaagtagcacatacgccggcaaaagcatggcgtaaatttgcacaatttgtgatgaaacatccaattgcaatgattattgttgttacaacatttattgttatttgcttattaccgttacgtacagctaatttgcagttccctggtattgaagctttacctgaaaagagtgatacaaggattgcatatgaaaagtatgaagaagcatttaatgaaactgtcaaaacacacgctgatgttacgttagttgtagagacgaaaaaagatatgaaagaaaaagaaagtctacaaaagatagaagaagtcgttcaaaagttaaaagatgataagaaagtacatgaagtaagaagtttatacgacgggttaactggaatgaaagcagatcaagttgttggaatattgcagtcgccagaatcagcgaaactaactcctgtatttgaagcatacacgcaagggaataagacgacgatagaaatctttttgaaaacaaaaccacgtacagagactgcaaaacagtgggtacgtgactttaaaaagaactataaagaaacggatgttacgtattatctaggcggaatgacgacgtttcaacaagaattagaagatgaaattaaagataaagttgtaattggtatgtctgttatatttggatcgacctttgttatattattatttgcattccgatctatgctcattccaattaaggcaattgttatgaatatacttagtttaagtgcaaccattggaattgttgtttggttatttgaaggtggtcatttcggtttagaagcgagtccggttctgtttgtcttaccaatcttcatttttggcctcgtatttgggcttagtatggattatgaagtatttcttatttcacgtattcatgagctctatgaagaaacaggagataacgatcaagcaacgttagaagggctcgtttcaacaagtagaattattacatcagctgctttaataatgattgttgtaactggtgcattcgcatttactgatattttaccagtaaagcagatgggtcttggcgttgcattagcaatatttcttgatgcaacaattattcgtcttatgctcgtaccaagcttaatgaagttatttggagactggaactggtggttaccatttcgaaaaaaacgagaaaaagcatcgtaaaaaatgctcatcaatatgatgaacattttttatgaatagcaaagcctacattttgcaaatagtatgtgataagaacattacataataagtaggtgaaggcaatgtttcgttattttaagtttaagttaaatgatacagtacagtttgccgagaacgatgggcatatgtatcgcattgtcggttatcggttagaaaaaggattttatccaaaagatgaatggactcatatcatttatgaactacttagagaatttgacgggtatacgatggatgcagaagaggaagaacttgtaaaggtcgttcaagtagaggatgagtattacaaaatacaagaagtatcaggttatcgctatccagtaaaaatgaaacaaaaacaacaagtgatgaaaatagaaaagatggacgatttattagatgcttacaatgattataaaaggttggcggatttctttaaagatttatcgtatgaacaaaaagctgaagaagtattattagaaatgaaaagacttagagcttgaggggcagtctattataagactgtcctctatttttgacagtgcatcaaagtgtgttttccgttacaatgagagaatcaatagaaataaggtgataaacagtatggaaacaaagaaaaagggcgaatggtgtgaaattatcgttccagctaaatggaatggtataagtattgaatcggtattaaaagtagaatgggaaataccgaaaaagctattacatcagcttcgtatggaaaaaggtgttacggttaacggggaacaaagaagatggaatgagcttttaaaagagaacgataagttacaagtccatatgtttgcggaggaagagtacggtgtagatccagaatatggtgaattacatgtagtatacgaagatgatcacgtacttatcgtaaataaaccagagcaaatggacacacaccctgctgaaagaggtggaaccgggacgcttgcaaatcttgttgcttttcattttcaaatgcaaggtttagagacgaaggtgcgtcatattcatcgtttagataaagatacgacaggtggtgtcgtgtttgctaagcatagaattgctggtgcaattatggatcgtctattaatggaaagaaaaattaaaagaacgtacgcagcgctcgttgaagggaaagtaaagaagaaacaaggaaagattgatgctgctatcggaagggatcgccatcatgctacaaggcgtcgtatttctccaaaaggtgaccaagctatcacatattataaagtagaaaagtattttaagaagcaaaacacgactttcgtaacgttacaattagaaacgggtagaacacatcaaattcgtgttcatatgagtcataatggtaatccactagttggggatgtattatatggtggacaaacaaaatatatgtccagtcaagcattgcatgcgatgaagataaatttcttgcatccaattacgaaagaagcaattgaagttgatgtgccgtttcctacaaagttaaataaaaaaataaaagaatttcaaaaagaaaatgcgtaaagtataagttttaacttgaaaaaagtagatttttgcagggatttctctaaaagaagcgaagccgttaagagaaaagagaggtgagaatcacttgatcaaatataagtatgtacttggaatatttttcgcttgtcttttacttactctatttctctatccctatttaccaaatcgtatggcagtacattggaatgtaaatggtgagccaaacgagtttatgagtaaacaagttgttgtagcatttattccctgttttattattttttcatatggatttttgtatattatttcacataatatatttaagtttaatgaaagagggcatggtattataggcggctttataaagaaaattacgttatttatgttgtttattcatatgcttatcctctttattaattttaggaaggtgatatcctttcaaacaggattaacgattgggattagtatgtttctttttatgctgagtaaagaatttaagaacataaaaggcaaagaaaaagaaaaagaaaaagacccaattaaattacaaaaaattcgtttagtgagtagacgaatttttcaagtgatggcatggggcatattgttttcattgtttttgaacttagagtggggattttatgtattgcttagtataataagctgtggatctatgttgtttatgttatatattttctattcatacataatagaaagctatgaaacttaaaaaagagtcttctcattatgagaagactcttttaatctatttacttcgtaataaattgttgtgtccagtagttgccgctttctacataaccaacaccgatgtgagtgaagccgttatttaaaatgtttgcacggtgtccagcgctgttcatccaagcttgtactacttcttcaggtgtacgttggccttgagcgatgttttcacctgcagatgtataagaaataccaaatttcttcatcatatcaaacggagatccgtatgtagggctgttatgatcaaagtagttgtttttttgcatatcttcagacttaatacgtgctactttgcttaattcagtatcgatttttagtgctggtaagccttgttttgcacgctcagcgtttgttaattcaacaacacgttgttcgaactcacttaaagattttgcttcttcagcaggcttttgctcagctggtttttgttcagcaggtttttgagtattgttgttttcagcaggtttttgagcttctggtttttgaacttcttcagcaggcttttgctcggctggtttttgttcaactggcttttgagtttctggcttagctgttggttgctcagttacaacattttcagtaggttgttgaccaggaatgaagcagtttggttggaagtttccttgttgccattgtgctaatgattcaactcccatagattgtaagaatgcttgtaattcttgttggttcatttgtttcatcatcacttttgaatgctgaatattttgaacctttacgttagatggttgtactgttgcagcttgtgcatctagagaagatactcctaaagtaagagctgttgcagcagctacagataataaaacacgctttttcatgatgtgtgtccccctatataaagttttaatttgttttcacacgatttgtttttgacagcctgtctgactgacaaattcatcgtagcatacaatttgcgagaaaaaagatggaaaaaaattcatagactttaaaattacctaatttatcctaagagaagaagggagcaaaaataagagaaatatagagtataaaaggaatttatagtgtttttatacttggttttaagagggggtttttggataaagttacctaaatagaaaatgaagaatcctattgtatcaatggtttgaacgattttttgaggaatataatggattgatttttacaaaactgtaatgtttctgttgttcttttttataataaagtaacatatttttaatgttgtagcagacaaaaaagcggctatctctttacatagacgaaggagatagccgttttcctattattacgtatgttacgagttattacgagttagtttcaattgcttctaataataaatccacaatgtgaattcctctcattttatgagaaagcccttctcgctcaatgcccaatttcatttgtaataaacaacctggatttgcagtaacaatggttgctgcttctgtttcatgcacacggtccattttgtaatctagaaattccattgataactctgaatgaacaatattgtaaataccagcagagccacagcaacgatcggcatctttcatttctcgatatgttgcaccttggatagcctctagtaacatacgaggttcagaagatgtgcgcataacattgcgtaaatgacaagagtcttgatacgtaataacttgcggcgtgagtcgtaagtcagttcgcttatggaagtctagttctactagtatagcagtaatatctttaatcttagaaacaaactgcttagcacgttcagcccaatccggatcatcctttaaaagataatcatagtctacaagataagccccgcaaccacctgcattggtaataatatagtcgatgtttaaatcttcgaatgcttttatatttcgctttgctaattcttttgctccactcttttcaccagcatgtccatgtaatgcaccgcagcaactttgtgtttttggaataacgatatcacaaccagctagttgaagaagtttcatcgttgcgttatttgtttctaaaaacatcgtatccattaagcagcctgtgaagaatgcaacttgttttttctttgtactttctgcaggtaaaaatgaaggacgatctttcatcgctttcattttagggacttttggtaaaacgagatccatcgttgcaagtgtttcagggaataacttcataatccctgttttatgtgttagcgtttgtaaaccagaacgttgataaaatccgattagtccagttaatgttctcattcgattttgatgggggaataatccttcaaaaacgacttttcgaacagctttcactggcaccgagaattttttattttgattaataatatcacgagcttcttctaataaatggccataatttacaccagatggacaaacaggttcacaagcacggcaaccaagacaaacgtttaatgtatcttcaacatcttcatctggttcgattaaaccatcaacgacagctttcattaatgcgatacgtccgcgcggtgaatgtgactctttatatccggattgaatgtaggtaggacaagtaggtaaacaaaaaccgcatcgcatacagtttagtaattcatcttcacttaatcgttctttaaattctttttgaatattttctttattcaatgtcgtcatcgctcaaccaccactctttttcgagtgtctttcgcgaacatttttccaggattcataatgttatttggatcgaaagcttgctttattccttgcatagctgcaataccttccttacctaatttcatttctaaatatggagctttcatcgcaccaacaccatgttcaccagtaattgtgccaccaagttcaattgctttcgcaaatatttcagcaaaagcttgttcagctcggtgcatttcttctgcattacgaacgtctgtcatacaagttggatgtaagttaccatcaccagcgtgcccaaacgtacaaataggaatattatatttttttgcaatggtattaatagcttcaaccattggagctatttgtgaacgtggtacagttgcatcttctaatattgtagtaggttttaatcttgcaagcgctgatagggcactacgacgagcggtacgaagcgcatctgcttctgtttcatcttttgcaacacgaacatcaaccgcattcatagagtgacaaacgttagccattttttcaatatctcgattgactacttcgggcggaccgtcttgttcgattaataaaattgcttttacatctgtaggtaaaccgatttgtgcaaactcttctactacttcaattgtcggttggtctaaaaactccagtgttgctggaatgattttatttgcaataatagaagaaacagcacgtgcagcttcattaatatcttcatataatgcaagcattgttttctttgtttcaggcataggaacaagttttaatatggcttctgttacgacgccgagtgttccttcagaaccgataaataaacgagttaaatcgtaaccagctacatcttttgctaatttaccaccagtgcgaataatatcaccatttggtaagacaagttcaagccccattacataatcacgtgttacgccatatttcaaaccgcgtaatccacctgagttttcattaatattaccgccgattgtagaaattttcatcgagcttggatctggtggataaaataaacctttttcttctaccgctttaataatatcaagtgtaatgacaccagcttgtacagtaattgttaagttttcttcatcaatttctaaaatattgttcatatggcggaaaataaggacgataccgccttcaagtggacatgttcctgcgcaaagatttgttccagacccgcgcacatacacagggattttgtaagtgttacatacttttaacacttcagctacttcatttgtattacgaggagcaatgactgcatcaggcattgcttggaagtttggagtggcatcataactataagttaaacgccccatattggatgtatctacattatcttcgccaacaatagatacgaatgaatgaataatttgtttttctaacattggaaatccccctcaaactgttaacgtgtttagttataataaacaacgtggtaacagtgctttcattataatgataaaaaagtcgagggattctttctatgtataatcatctaaagattaatctgttttatcgttcttttttgtatgattatctaataggaggagtgcgaagtataaaacgtttaagtctttgaattgttttggatcaagtcctgtatgttcttcaatcttttttagcctataatgtaaggtgttaatgtgtatatgtaattgtttagctgtctgtttataagattggttataatcgataaataagcgtaaagtgtgcataagctcaggagatgatagtaagctttcgatggtacgctctagaaattgttcacgcgtttcggcagaaatatcttgtaaacacatttctaaacgtaaatcttcattaaatacaatttttttcgtttccaatgatacagaaagagcacgtaatgcttgttcgtaacatatgttcatattgtttggggtaactgtttgcccaatcccgatatataaaggaatagaaaataaagcttcgcagtcttgttttaaccgttttaaaaactgataagtttgttctttggagctcatcgctgtaaataaaataaaacgatcatttccccagcgaacaaatagatgctcttttgttaaaatatttcgtacatgttgccatattttacgctggagcattgtgtcatttttgccaatagaaaacaaaacaagttgttttttcttatataaatcaatgccaagtgttttggcacgatcaagaaaactcggggaccactctgtattttgaagccaatcaaagacaaaagcttcataagaacggtgctcaagttctaattgctctaaaaagtagttttcatgaattaataattcggtcatcttacgcaatatttctccgtagcgtgaaatgttttcaggttctccggtaatcccaatgacaccgattacttcatcatgaaataatagaggaagattcatcccagcctttacaccttgcaatcgcctttcatcttcttttgtaatgatgacggttttcttttgtttagcgcagcggagtgcaccttcatgaaattggccaattctttctgtatctgtacttgcgataataacgccttctatattaatgataattatattttctgtaattagtctgcgtacttctcgtacaattttattcgctaaatcaggaaatagcataattgacacacctcaaattctatttgttgtacattatatatgtaaattgagtaagaaaggggaatttcacactttccacacatttatttgttattttacaattataacgaaatcatctgaaggtggagggaatcttttgagaaagtatgtttttcttctctgttttttatttctattagtagggtgtcaaggaagttcatatacaccaattgctaaagataaaaatgttattataactacgaatataaaagaaggcagtattagttttattgataaaaaagataaaaagttaattacgacatgggaactaaatgagccaatggctggaatcacactgcttccaaatggcgatgaaatacttgtatacggtaagcaattagaatatatgtatgtatattcactagcggaaggaaggcaagtggaaaaatataaaactggaaagggcattgtaaatgtggtcgtatcagcagataaaaaacaattatttgctgctgatcaaaatgttcaaaaggtaaggttctttacgataaatgggaaagagacaggaaatgtttcaacaggaaaagggcctataacgatggtagagtatcagaatcggttatctgtactaaacttttatgatacgaaactaacgacaattgatacgaagaaaaaagaagttgttcaatcctttatgattccgccagcatcaacaggagcgacgattagtcctgatgggaaagaaatatggattggcgggcatggtgatggaaatcaagtgaatgagaaagtattagtgtattctttacagagcggtgaaatggtacgttctttacacgctccatttatgcctgtgaacataacgaaagataataagtacgtatatgcattaagccacggttcgaatatgcttagaaaatttgatattagtacgtataaagaggtagcttccgttgaaataggctcaaatccatttgcatttttgaaaagcggagcagaaggatatgtagcaagttatgatagtgatgaagtgtgcgtcatggatatgaagagtatgaaaataaaacaaacaattaaagtcggaaaaggaccgtttcaactcatagagagggaagggaaggacaatgaataaatatagagtgctagttgtagatgatgaaagtgatatgaggcagcttgttggaatgtatttggataactttggatatgagtggggagaagctgaaaacggaaaagaggctcttaaaaaactagaaacggatcattatgatttcgttgtattagatataatgatgccagaaatggatggactttcagtttgtaaagaaattagaaaaacgtcagatgtgccgattatatttttaaccgcaaaaggtgaagagtggaatagggtgaatggcttacgtatgggagcagatgattatattgtaaaaccgtttagtcctggtgaattggttgcccgtatggaagctgtactaagaagatatacaaagcaagaacagcaagaagagattcaatttggaccaattcttatcaatgaaaaaagcagacgaattgaggcgaatggtgagtcgatttctcttactgtaaaagagtttgatttactatattttctttgtcagcatacaggacaagtatttagccgggagcaattacttgaaaaggtatggggatatgattatgccggaagtacaagaacagtagatacgcacgtgaaaacgatgcgcttgaagcttggagaaagtggaaactacattcaaactgtttggggtgtaggctataaatttgaggtgtaacatatgtttacgatggtacaaaaactttggcttacagtagtatgtgcagtatgtgtaacagtgtcctttctttatttcgtatctttatactcgtatgaaaagttatacgttgataatttaaaaacttcgttagtaatggaagggaaaagtcttgctgctcaatatgataagcgtgaaggaatatcaacttttgaagagaaagtaagatcgtttgatcaaatatctagttcagacgttattttcgtatctaatccgcgtgatttaagcgcatgtttgccttttgatgtgcatcatcattctcttataagtgaaggagataggcaaacgctattagatgggaaaactgtgacaaaaataggatatgaagaacattttgaacgtaatattatgggggttgtcattcctgtattggaaaataaaaaattagtcggaattgtctattcgtatattcctttaaaaagtataaaagatttaatctatgatatgggtcttattttagcaccgctagcaattgctatgattttaattacgatatgggttggaagaaaaattataattgcaattacgaagccactttcgcaaatggagcgggttgcaaatcatttggctacgggagatttttcggagcggattacagtttcttcagaggatgaaattggacgattaggaaaagcatttaataaaatggcaaattcattagaaacagaagatgtaaagcgtaaggaatttttagcaaatgtttcgcatgaacttagaacaccacttagttatataaaagggtatagcgaggctattttagatggtgttgcaaagggagctcagcaggaaaaagtaactcagctaattcataaagaagcaggtcgtatgcagcgtctcgttcatgacttgttagacttagcacaattagaaggtgagcactttccgttaaagaagcaacctatcgttttttcacagctgattgaagacgtattagatacgtatgagattaagtttatagaaaaggaaattcatatttcaaccaatttaaatccagaggtcattgtcatgattgatgaggatcgtatgcaacaagtgcttcataatgtgttagataatgcgatacggtatacaaatcaaaaaggaaatatcgttataactttagagcaaatcgatgattactgtgaattaaaaataaaagatacaggaattggcattgatatagagcatttggagaatcttggggaacgcttttaccgagttgataaagcgagaagtcgtcaacatggtggaacaggtttaggccttgctattgtgaaacaaattgttcatatacatggtggacagtggaaaattgaaagtgaaaaagataagggaacaacggttattattaaactgaatgtacaggatgagggggcatgttctaatttttagggcatgttctttatattgaagaaaatatttatcccgctattctccggtcagtaagaccctcacctcaaaattcagcggaagcaaagaagttaggtggaggcactgctgcccgtaaaagcccgattggtgagggctaataatcagtgggggatgaacaaaaccctcactgattaaagtttcactttatacgtaaaaatataaattaatatgtaataaatatcgaaaatttgactattttatgaacaaaacatttgtacttcttatcaattcggtctaaaatagttatgatgcaaagttcttataaatcgtttcaattgttgtttggaagatactgaggtgatttaactggagtacaaatctattaaaccgaaaaaaatttacgaagaagtatctgaagctattttaacaatgattaaaaatggtacgttaaaacctggtgacaaactactccctgtgcatcaattagctgagcagtttcaagttggcagatctgctgttcgtgaagcgctaagtgcgctaagagcgatgggcttaattgagatgaaacaaggagaaggtacatatgtgaagaacttcgattcttcttcattaacgaaatcattaaacaatagattattaatgaagaaagaagatattttgaatttattagaagtacgaaaggtgcttgaagtgggggcagttcgagtagcggcggcaaaacgtacggaagataatttacaaaatatgaaacattggttagatgaaatggcaaagagcattggagatgaaaaggctggcgaaaaagccgattttcaatttcatatgggaattgcagagtcttcgcataatagcattttgcttgaactcatgaatcatgtttcagagatgattgctgaaacgattggtgaatcaagacgcattattttatatggtgaacaaacgacatcagaacgacttatagaagagcatcaagttatatatgatgcggtgttaaaacaagatgtagaattagcgcagcaagcaatgctagatcacttaacaaatgtagaacatattgtcacaggtaaaaacgatataaattcgtaatttaatcttttaaaaatttaattttctgataaaatagagaaaggttaagtaagcgttttctttagaagagggagaggataggccatggttgagcctatttcttctctgctaagtcatctgatgaccatatgtttgttggtgaagttgtaaaaagggggagtaatagttatgaaagttactttatttgttacttgtttagtcgatatgtttgaaacaaatgtcggtaaagcaacggttgaagtgttggagcgtttaggttgtgaaattgaatttccagaagcgcaagtttgttgtggtcagcctgcttataatagcggccatgtagaagcagcaaaagaagcaatgaaacatatgattgaaactttcgaagatgcagaatatattgttacgccatctggttcttgtgcgacaatgtttcatgagtatccacatgttttcaaagatgatccaaagtgggctaaacgtgcacaaaaagttgctgataaaacttatgaatttacacagtttattgtggatgttttaaaggttactgatgttggtgcaagtttaccaggggtcgctactattcataaatcatgtcatatgacacgtatgcttggaataaaagaagcaccaggaattttattatcaaatgtaaaaggattaactgtgagagatttgccaaacgtgcaaaattgttgcgggtttgggggaacgttttcagttaagatgactccaatttctgagcaaatggtagacgaaaaagtagatagtgtaatggaaacaggtgcagattatttaatcggtgcagattgtgggtgtttgttaaacattggcggacgtattgagcgtttaggaaaagaagtaaaagtaatgcatattgctgaggtactgaatagtcgctcatgaagggggaacataagctatgtctatgaaaatcagtgagaaaaaatttaatgatcgcgttggtgatggaattcaagattcgtttatgcgcggagcagtatcttctgcacaaacgcgtttatatacgaatcgcttaaaagccgcagatgaactaggaaactgggaagagtggcgtgaactaggtgaacaaattcgtcaacatacgttagaaaatcttgattattacttaatgcagttaagtgaaaatgtatcaaaaagaggcggacacgtgtactttgcgaaaacgaaagaggaagcagcaaagtatattcaagacgttgcaaaaaagaagcaggcaaaaaagatagtaaaatcaaagtcgatggtaacagaagaaatcagtatgaaccatgcgcttgaagagattggctgtgaagtgttagagagtgacttaggagagtatatcttgcaagtagataacgatccaccttcacatattattgcacctgcacttcataaaaatagaacgcaaattcgcgatgtatttaaagaaaagctaggttatgaaaattctgatgacccgtatgaaatgacaaagtttgttcgtaaacaacttcgtgagaaatttatggatgcagaaattggtgtaactggttgtaactttgctgttgcaaatactggctctctttgtttagtaacgaatgaaggtaatgcagatcttgttatgtcaattcctaaaacacaaatagcggtaatgggtatggaacgtatggttccgacaatggaagaattagatgttttagttggtttactatgtcgtagtgcagtaggtcaaaaattaacaagttatgtaacagtagcggggccaattcaagaagaggaagttgatggacctgaagaatttcatttagttgttgttgataatggtcgctctcaaattcttggatctgaattccgttcagtattacaatgtattcgttgcgctgcttgtgttaatgtatgtcctgtatatcgtcacgttggtggacattcatatggatcgatttactcaggaccaatcggtgcggtattaacaccgcttctaggtggatatgatgattacaaagagcttccttatgcatctagtttatgcggagcatgtacagaagcttgtccagtaaaaattccattgcatgatttattattaaaacatcgtcaagtcatcgttgagcaagaaggtcgtgcaccacttgcagaaaaactggctatgaaaatgtttagtatgggtgcttcttcagctgctttatataaaatgggttcaaaaatggcaccagcggcaatgagtccatttacatctggtaatcgtgtatcaaaaggtgttggaccacttaaaaactggacggatattcgtgaattcccagctccaagtaaagaacgattccgtgattggtataaagatcataagaaaggcggggataaataatgacaggattaattcaaaaccgtgatgcctttctagataacattgcaaaagaacttgggcgcgcgcgtaaaacagaaggtgtagagcgtccagtatggaaaagtaatgtgaatatagaaacgttaaaagattattcacaagaagaattactagaagtgtttaaagagcaatgtacaaacattcatacaactgtagtagaaacgacaaacgaccgtttaggtgaagaccttcaaaaagtaatcatggaaaacggcgggggacctattttattatcagcagatgcgcgttttgatgcatatggtttaacatctttatttaaagaagaacttccaaaacgagatgttgaagtaaatgtatgggatccagagagaaaagacgaaaatatgcgtttagctgaaaaagcgaatattggtattgcatttagtgattatacattagctgaatctggtacaattgttgtacaaagtcataaaggtcaagggcgttctttacactttttaccgactgtatattttgctattattccacgtgaaacacttgtgcctcgtattacacaagcagttcaggatatgaactcacgcgtagaaaatggggagacagcggcatcttgtattaactttattacagggccaagtaactcggctgacatcgagatgaatcttgttgtcggagtacatggaccattaaaagcagtttatttcatcgtataaaagaggggaaagcaggccaggaaatggcctgctttttagtagaataaaggataatatgaagtagaagttctctcctttttttgctatgttttttgggaaaggagaggaagggatgttcacttatttatatgcactgttagcagggatggtgtttggttctttttttatgctagttgcgatgagggttccattaggtgcttctattattaccccgcgttcacattgtgattattgcaaatatgtgctaaggacaaaagaactaatccccatcatttcattttatatacaaagaggctgttgtacgaattgtaagaggaaaattccaattatgtatgtagcatttgaatgtataacaggaggtatatttcttcttacagtgtatatgattggaatagaacgagagcttattattattttatcccttttttcgctgcttcttattatttcagttacagattacttatatatgttaattcctgattgtattttaatttcgtttgcctttttactcattctcgaaagtgtttttgtacaattagttacttggacagatagtatagctggtagtggtgttatatttattttgttatattgcatgcaaaagatatatccagaagggcttggcggaggagatataaaactactttcgttacttggatttatagtaggagtgaaaggagtttttatcgttttatttttagcatcttgttttagtctttgttttttcgggattggtatcggattaaaacgtatagaagtacgaaagccaattccatttggtccttttattagtctcggggcaatatgttatgtattggccgcatattcaaattagagagggaatcgaaaatgaacgtatatatggatgatcaaagaagttgcccgttcgggtatgtgcccgcaactacagtagaatgtgctttgcaaatggttcaggattatgatgtgaatattctttctcttgattttaatatgggatggggagcgaaaaatggactggattttgtagaagctttttgtacagaggggttatatgtaaatgaaattcactttcatacgaatgatgtcatcggtatgtacaagatgaaacagagaatggataagggaaaggaagaaggagaaattactcctcaccttgttattaaatacgtgggaagctaaaaactccaaagtaaaactttggagtttttaatgtttcatatgggcttgtaaaggaataatctcttcttgttgagctgttgcgatttcagtttcttcctgttgaacttcaggggttttctttgttaagtagtggtataccataccgacaaatactgatccgccaataatgttaccaattgtaacaggaattaagttatgaatagcacctgaaaaagaaattgtctcaggatgcggtgaaactaaagataaagcaaagagtgataagtttgcaatactatgttcgtaaccagataagaagaatgtgaaaacaagtagcatcatgaccattatttttgctgtgtcacctttaacctgagaaggtaagaagcaagcaagacatacgagccagttacataaaatggctttaaagaataactgcatcgtaggtgtattcatctttccttcaacgactttactcattaagtgaccgtgatcaattgcttcaaaaattccagttgcgtaaaatagtaaggcaaagaataatgcgccggctaagttacctgcataacaagcaacccagttacgaagtgtatcagaaatcgttgtttcttttcttaaagttgcgacagtaaagtacattgtgttcccagtaaacaattcagcaccgccatatataataagtacgagagcaatcccgaaaaacatagaagcggctaaataagttgctggtgaatctgcaatgtgaaaaaagttacctaatttaaaacatagtacaataataaaaccgatataaataccagcaagtgcagcacgaatgaaatattgcattgggtttgtatctagtattttctttttgcttttagccagtttgacaacataatctagtccttgttctagcatgagtaatacgctcctttagtaaatcttctataaatactccttatatgaataaagtacatggaattgttcttactttcaataagtttgtgcaatgtttcacaaaaaggacatacatacattaagaaaacgtttacaaaaggtagtataatggaattttttctggacattgcgaggaagaaaggaaaaagaaaaagcgctgtaattacagcgctttttcgtctaaattcttttccacttttacttctacttcttttgagaagaaccaaccaccaactgcgattccgactaatacaatccagaatgtaagcttccacggagtggattctgggaatgaatgtggaattacatttaatgcaggatgtgctaatgtataaactgctagcttcacaccaacccaacctacaattaagaatgctgcagtttcaagccctggtttacgttttaagatttgtacgaaagcagttgctgcaaatcgcataatgattaatccgataagtccacctacaaagataacaacgaattgcccagtatcaagactaccaattgtacctagtcctgtttttggtaaagtcattgctagtgcaacagcagctaaaattgaatcaactgcgaaggcgatatcagcaacctcaactttaaatacagtccaccaaaagttctcttgttttttctttgcttctttttcttcagtttcttcatctgtattctttttaacatatgttttaaataagtgattaccagcgataaacataaggtagatggcaccgattgcttgcacttgccatacatcgactaagaacgaaatcataaataacgatccaaatcggaaaacgaatgcccccgctaatccgtaaaatagtgctttctttcgtttttcttctggtaaatgttttaccataattgcaagaacaagagcgttatcagccgccaaaatcccttcaagtgcaattaggatgagtaatacccaaccatactccaataataatgatacatccatgtacattctcctctcatctctataacttctaaataagtgaagaatttccccactatttagtttccccatactcctgcctattaactttgggagaatctggaaatgaatgcaaaaaagacctctgccgttaataggcaaaggtcttgctagacatatgtaataaaaatgccaacaaagccggaagaactaagttctacgtaatgacgactttgtttccaagatatattcttggacgctactcccctttggagatatgttattgtattctcattatatggataatttatacggttgtcaacctgttaaaatatcttcattcggatattttatttttcggttctttttacgagcaaatgaaaatgccaatgttaaaggacccattttcccaaaaaacatcataaaaataataatcgcttttccaattatagttaagtggggtgttaagttcatactgaggccaacagtcccaaatgctgaaaatacttcgaaagcactcatcaatagagaaactcgttcagtaatactcaaaattaaaatagcaaaaaagataaatgaaatagaaataatagtaatggttaatgatttgacaatgagagtatctttaatggattttttaaatacgacaatatcttcttgttgttgtaaaaatttaaatacgccaaaaaatatgattaaaaatgttgttaacttaatccccccacccgttgaagcactaccagcaccaataaacataagtagcatcattaatagcagggaaggttttgacaatgtagaaatatcaactgtattaaaaccggcagttcgcgttgaaattgcttggaaataagaggccattccttcttcaaatggggtaaaccctctcatagaaagggagttatggaactcgaatataaaaataaaaagggtagcaataatgttgatgattagagtagaagagagcataagttttgaatgtagtgtaaggtttttaaagtttttctttctttttatgtctacgatcactgtaaaaccaattccacctaaaatgatgagagaggaaatgacgaaattgacaataatgctatgagaatgggacattaaattatcgctccacacagaaaaaccagcattgttaaaggctgagattgaatggaaaaaactataatagatccctttggtaaccccgtattttggtacccaatcaaaagaaagaattaaagtagcgatacattcgactgtaaaagagaataaaaataatgctttggcaagacggatgacgccgcctatattcgtttgatttaatgcttgttgcagtaaaatccgattttgaagaccgatttttcttccgagcataatcgcaattaagacagcaaagctcataataccaagcccgccaacttgtataagcgttaaaatgatacattgtccaaacaaagtaaatacttttccagtgtccacaacaccaagtcctgtaaccgtacaagcagaaactgttgtaaataaagcatcgagccatgaaatagacgttgttgtagcaattggaagctttaataagcatgtacctataattgataacatgataaaagacaaagtaagaacgcggggaggactcatacgaatgttaatccgtttcatgttatatatcgttcctttctgtttgctcttactagtatgtgaaaaagtccgattatgtatgtgaaaaatagaaagaggcagagaatatctgcctctaagccatatgttatattattatccacgtaattgttgttgagctaaagaaacaagacgttttgttacttcaccgccaactgatccgttagaacgagatgctgtattagaccctaagcttacgccgaattcttgtgcaatttcatatttaaattgatcaagtgcttgttcagcacctggaactagtaatttgtttgtttttgccatgatgatacacatccttatgagtaatccagtccagataagtacttatctgaattggtactgttattttatgtggaaccggcgtgctcatacgcggaagtaatcggtgtgattagaagttattggatagaaaaaagagtagcaaatttgctactctttttttagtattgtcgctgtaccttccacgacaatatcatccgattgattatatatatttgtttgcaacgtaatgatttttttatcgtcacgcttcttaataacctctgccacaacgcgaagtgtatcaccgattttgacaggggcacggaatgaaacattttgggataaataaatcgtatttttgcctgggagtttcgttccaaggatggtagaaataaaactcgaaacgagcataccatgggcaatacgttctttaaacattgtcgttttcgcaaaagaatctaaaatgtgaataggattcacatctccagtcaattttgcaaaattgataacatcttcatctgtaattgtttttgtaagggatgcttgatcaccgacttgaatctcatcatagcgaagctccggaacagtttgtgcttcttgaaatggattcattttgtcctccttcttttccatatcgaaaaatgttagccatcttgatgtagtaggaggaagaaagagttttgtttgtgctgcggttagctcccacatttttcttacttgatggaagtaaatagattttttgagttttcctcgaacttttttgcgagttccaactgttttgacttgaactcttccaaaaaaccctctaactgtttttgagcctcttcacgttgtaattgttgttgttcaataaattgttttgttgtttcttcaaattgaccgcttgtttgtgtaagaattgacaaagaagtttttgtaggagaaacggtaagctgatgcatatgagcagaaagttctttccatttgtcttgccactcgttaatttgatcatttaaggagtttccagttaattgtttcacgtaatctgtatattggttattgaactgagcagtgagttgttgtagttctttttctagttcatctactcctgatgttaacttatgcaaagcgtcttgttgttgttttaatgtttctaaagtaagttgctctaactgtttcccagctgaagagaaaagggaaagtgattgagaccagtttttccaaaatgcatcgactaattcgtatggtttagtttccattgtttgacccccaaatgtttttttgcatattgtgaacgcagattactctgctgtaccaccaggtgaagatgaagaatccttttcatccttttctggagaagtagaaaatggaaagaatgcattggtgtataacgtgaaaaacgttcgcaacatattttgataatgttcaaaagaagtcgcacatgttgttaaatattgctctccatattcagttaaagaataaattctttttgctggccctccatcgcttgtatcccaagtagaagaaataaggttttctttttctaacttgcgtagtgttctataaacattaccttggtcaacagaagaaaagccgatatccattagcatttgaataagtttgtaaccatgaagactccagtcttttagacagagaagtaagaagggaactaagaagttttttggcatggagtttggttgtttcgcttggttgctctccaaactttcgcgttgttctggttcattttgtagcatgattgtgcatcacctcatgaatcagttagatggaattttttgcttataagtgcaatttacacctatctgtttttaaagtcaacacatttgttagaaaatagaaaaaaataaaatatagacttgaagttttattcagaatattagaaaatagtgaataggttgaattgtttcaaaaacgaaaaaaggagtgtaggtaaagtgattgatcaaaaattcgatccactacaagcatggaaaaatgcttatgaacaaaccgaaacattttggggaaaagcgctcaatgaaacaattaaaacagaagaatattctgcttggatgggcagcgttctagatttgaatttgttttatcaaaaagcattaaatgatacgacaaaaagctatttagaacaagtaaatgtgccgacgaaagaggatatcgcaagagtggctacgcttgttattaacttagaaaataaagtagataacattgaggagtttctagaggagaaagtagattctttaggacaagctcctacattaaagcgtgatgtgacgaaagtaaaacaagatattcgtacgcttgaaacaaaagtagatcaaattttagaattgctagaaaagcaaaatgcagaactagctaaactacaagtacctgtaaaagaagaggtaaagcctgcgaataaaccagaaaataaaaaatgataaaagcgcttgtttataacatgtaaaagagagagggagaatctcttttcgtgtataaacagcgaaacataattatatatggactctatagtatgagtaccaaaatgattcataacaatcgttcacaaattcatttaagggggaaaagaaatggttcaattaaatggaaaagtagcaatcgtaacaggtggagcaaaaggaattggaaaagcaattacagtagcattagcacaagagggagcgaaagtagttattaactataatagcagtaaagaagcagctgaaaatttagtaaatgaattaggaaaagacggacatgacgtttatgcagtgcaagcggatgtttctaaagtagaagatgcaaaccgacttgtagaagaagctgtgaatcattttggtaaagttgatattcttgttaataatgctggtattacaagagatcgtacattcaaaaagttaaatcgtgaagattgggagcgcgtaattgacgtgaatttaagtagcgtatttaatacgacaagcgcggttcttccatacataacggaagcagaagaaggaagaattattagcatttcttctattattggtcaagcaggtggatttggccaaacaaactactcagcagcaaaagcgggtatgttaggatttacaaaatcattagcgttagaacttgcaaaaacaaatgtcactgtaaacgctatttgcccaggatttattgatactgaaatggtagcagaagtaccagaagaagtacgtcaaaaaatcgttgcaaaaatcccgaaaaaacgttttggtcaagctgatgaaattgcaaaaggtgtagtatacctatgccgtgacggtgcgtatatcacaggtcaacaattaaacattaacggcggattatatatgtaatgaagtaagaaaaaagtgcatatccatagcaggaatgcacttctttttttagaaggaaatcgaccaaaaaggagatagaaaaatgactacattcgcaacagaatgggaaaagcaattagagctatacccagaagagtaccgaaaagcataccgccgagtgaaaagggcgagtgaaattttattacgtgaaccagagccccaagtcggattaacgccgaaagaggttatttggacgaagaataagacgaagctttatcgctacattccaaaacaagaaaaaacacaaagagttccaattctattaatatatgctcttattaataaaccatatattatggatttaactcctggaaatagtttagtggaatatctagtggatcgtggttttgatgtgtatatgcttgattggggcacatttggtttagaagatagtcatttgaaatttgatgatttcgtgtttgattatattgcaaaagcagtaaaaaaagtaatgcgaactgcaaaatcggacgagatttctttacttggttattgcatgggtggaacgctaacttctatttatgcagcacttcatccgcacatgccaattcgtaatttaattttcatgacaagtccttttgatttctctgaaacaggattgtatggccctttattagatgagaaatacttcaatttagataaagcggttgatacatttggaaatattccgccagaaatgattgatttcggaaacaaaatgttaaagccaattacgaactttgttggtccatatgttgctttagtagatcgttcagagaatgagcgcttcgtcgaaagctggagattggttcaaaagtgggttggtgatggtattccgttcccaggtgaatcatacagacagtggattcgtgatttttatcaaaataataagttggttaagggtgaactcgttattcgcggacaaaaggtagaccttgcaaatattaaggcgaatgtcttaaatatttccgggaaacgtgatcatatcgctttgccatgtcaagtagaagcattactagaccatatttctagcacagataaacaatatgtatgtttaccaacagggcatatgtctatcgtttacggtggaacagctgtaaaacaaacatatccgacgattggaaattggcttgaagagcgttctaattaaaaataaaaaaatccaactagcctatgttagttggatttttttatgaaaaataacaaaacatagaaaggagaaatttatattttaggagtataattatgaaacttatgatgggtaagttgttttggaatacaggagtttctgtaccttgttatccactgttagaaaatgatatgatatgtgatgtgctcgtagttggaagcggcgaagccggtgctcatatagcgcattcgttagcgaaaattggcatgagtgttacacttattgaaaaaagagcaattgcgtgtggtagcacagctgctaatacaggtttactacaatttcttcatgataaatcgttaacctctcttatccatacatttggtaaagaaaaaggggtacgagcatataagctttgttatgaagcgctaagaacaatggaagaggttataccgactcttgatattaatccccattttattccgcgaaatagtttatattatgcaagtaaaagtgaggatgtctcatttttacaagaggaatataatacgttacagaattatggatttccagttgaatattttacagaagctgatattaagaaacgttattcttttgcaaaacaagcagcgttatatacgcaaggtgatgctgaggtgaatccgtatttactagcgtatagttttttgcataaagcaaaccaaatgggagctaatatatatgaacatacagaggcaatacatataaaaaaacgcaaaaatgatttaatttgttacacgaaaacaggaaatcaaattgtagcaaagaatattattatggcgacaggttatgaggcgctttttggaaagaaagaaaaaaatacaacagtagacacctcttatgcaattgtaacaaatgaaatagatcaatttgaaggctggcatgagcgatcgttaatttgggaaacggcacggccttacttatattttcgaacgtatcgaaaccgcattattgtaggcggattagatgaagcgctacaaattcaaacaattggtgatacgaaattattgcataagcgtgatatccttattaatattgtaaaagagatgttcccgcagtataaaaatatacaggcagactactattgggcagccgcatttggtggtactcatgatggtctccccattttaaaagaagacgaaaagatacataatttgttttatgcattgccgtatggaggtaatggaactgtatatggaatggtctttgccaaattatttgagcagttatttacaaataaagaaagtaaagatttttctttatttaatcgatagaaaaaaggtagcgaagtgatggaatgagagatataaaaaagtttttacaaaaattacgtcctgtacaactcatcgttttgttttatttattagcggtagttgtatcggtgatattgcttagtttaccgtttgttacgaagcctggtgtgaaatggacatttatagatgcgctttttacatcggttagtgcggtaagtgttacgggactgtctgttattacgatttcagatacgtttactacagcaggaattattgttttagcccttattttacaattaggcggcttaggaattatggcgcttgggacatttgtttggatcattacggggaaaaagattggtttgcaaagaagaagattaattatggcagaccataatcaaggaaatttatcgggtctcgtagaattgatgcgttctattttaattgtaattatttcaatagaacttattggagcaatcttattggggacaagatttttactttactttccgacttggcaagaagcttattttcacggtttctttgcagctgttagtgccactacgaacggcggatttgatttaacaggacaatcattaattccgtataaaaaagattatattgttcaaatgattcatatgttactaattattttaggagcgattggtttccctgtgctaatggaagtgaaacaattccttagtaaaaggagacaacaattattccgtttttcattatttacaaaattgacgacaacaacattttttgcactcgttgttgttggtacaattatgatttttttactggagagaaatcattttttagtaggaaagtcatggcatgaaactgtattttatacattattccaatctgtgacgacgcgaagtggtggacttgcaacaatggatatacgtgaattatcacaaccgacgcttttatttatgagtatattaatgtttataggggcatctccaagttcggttgggggcggaatacgtacaactacatttgctgttagtatattgtcactatacacctttgcaaggggcggtagaacagttagagtcttcaaacgtcagctacatgaagaggatgtactgaaagcatctgtcgttatgacgatggggattttgttatgtgctactgcgctattcattttatctattacggaaaatgtaccgcttatgagcttaattgttgaagtttgttctgctttcggaacgacgggactatcaacaggtgttacgcctgatttaacaactgttgggaaacttgtacttattgtgcttatgtttatcggacgcgttggtattttaacatttattttagctagtggtggaagggaacaaccacctcgctataaatacccgaaagagcggattattattggatagtatgaaaccattctacctacgttaggtagaatggttttttagtcgttaatgccaaattgtggatgcataaaagcttcatttttattatccacttcgttttttagtaactcttgattttcttctgaaatccacccaatatcatttgtcggatggatccactcatcgccagccataatggcaggatctacttcatcactccaattgttaagcggactgttctcggaattatatttactgtctccaattacaacattatattgattcacaaaaggttgttgcatcgtttttcctgttcctttaaaagatggaaaattcatttgatgcgggagcgtttcgtctaaaatgggtgattgaatcttttcttttttcttcaaaattatcgctcctttttataatgatttcttcatatgtagtatttccatctaacgcctcttatgtacttgttaacacttgccagtaataattattttaagttgtttcaaactagagtagaaagtgatttcttgagagcaggtgaatgtattggtaaaaagaaaagtgaaacaaaatgcggcaatcaataataataaaactccgaaagaaagcttaccagatgcagaatttgcattagagtatgaaggagaaaatagcgcaaagtatgcgaatcgtaattcaaaaaaagggaaacaaaaatgaggcgttttttacaaacgcctcatttttttgtgggattataaaggtttttttaattatttgtaaatttagtgttttctattagcagaaaaatgcgaaaaaacatagaagtagcaacgtattacacaaaaacaaacaacaaacaaaagattaatgttggtttaatactgcttttacactagttgtttatatttgagttgtacataagatttgtaaaaggagagagaaacagtgaaaaaaacaatctttaaagctgtagcgactggaatggtattttcgttattaatggggtgtggtgcaaagaaggaagaaagtgctggagcgaaagtgaaagatgacaaattatctggatcattaactgtttacacagcaattgaagaagagcttgtaccaatttatcttgattcctttaaaaagaaatatcctgatgtgaaattgaacattgtacgtgattcaacaggagttattactgcgaaattactagctgaagggaaaaatacacaagccgatgttgtatggggaactgcggcatcaagtctattagctttagataaaaaagatatgttaaaaggatactctccaaaaggagcagatcgtgttcttccacaatttaaagatgataagcaacctgaaaaatgggtaggaaatactgcatttatgacggggattgctgtaaataaagaagagttaaagaagaaaaatttaccgatgccagaatcatatgaagatttaacgaaaccagagtataaaggaacacttgttatgccacatccagcatcatctggaacaggatttttaacagtttctgcatggctacaaatcatgggtgaagataaaggctgggattacatgaagaaacttcatgataatatggcaagttatacgcattcaggatcaaaaccagcgaaattagcaggagcgggtgaatatccagttggcgtatcaatggtttatagtgctttgaaagagaaacaaaaaggtgcaccagttgaagttgtattgccgaaagaaggattaggttgggaagtagaagcgaacgcacttattaaaaaagataatgcaaaaaatgaaaaattagcgcaagcatttttagattgggcgattactgatgatgtaatgaagttatacttcgagaaaaatggatttgcgacaattaaaaatgattataaacttccagatggattccctaaagatgtaacagaaaagttatacaaaaaaaatgactttaagtgggcagcagaaaatcgtgacaaaattttagaaaaatgggaaaaagagtttggccaaaaagcagaaccgaaaaagtaagtgagtgggagagagaaaaaatgagcgaatatttatcaattcaacacattcaaaaacagtttgatgcatttacagcgttaaaagatatttcttttactgtgaacaaaaatgagtttgtatgtttattaggcccaagtggttgtgggaaaacgacattgcttcgaattttagcaggtctagaagaggcaacaacaggtagtatagctgtgaatggaaaagatattacagcattacctcctggaaagagaaacttcggaatggtgtttcaatcgtatgcattatttccgaatttaacagcacttgaaaatattgaatacggcttaaagacaaaaaaatatggaaaagcagaagtaaaagagaaagcgctagaggcgttaaaacttgtagatttactgaatgtaaaagataaatatcctgctcaaatgtctggtggacaacagcagcgagtggcacttgcacgtgcgctcgctctgtctccagatattttgttacttgatgagccgttatctgctttagatgcgaaagtacgtgaaaagttacgtagagaaatgcgtgatttgcaagagaaagtaggagtaacaactattatggtcacgcatgatcaagaagaggcattaacgatggctgataaaattgttgtaatgaatcatgcggaaattatgcagattggaacaccagaggagatttatcaaagaccagccaatccgtttgtggcagattttattggttctattaatttcttttcgaaaaataacgaagagcatgcaattcgtcctgaacatgtaacaattgtacaaaaggacggtattaaaacagttgtggaaagtatggaatttcgtggatctgtatatcgaacggaagtgcgagtcgtagaagaaaacacacacctttataatgagaaaattgtagtggatatattagcatcagaagtagaagtagctgatattagaaaaggaaagccgattcaaatctctttctcagaaaatcatatgttgtcatatggaaagaaggtcattgtatagatggagatgttagaaaactacaaggtagaaagtgcgaaaaaaaagattaagagaagtatagggaaagaggaatggatccaaaggcttgtaattatcggtatgattctttccttccttgtcatacttgtattaccactattacaactatttacacaagctttttataataaagatggagttttcattggtttagcgaatttcagtaaatattttacaacaccaactttagttcagtctttacaaaatacggtatggatttcgggcgcaacaacaattatttcagtttcaattgcattcgtttacgcatatgcaattgcccgtacgaatgtttttggaaagcgtgtatttcagtatgtagcgttattaccattgtttgcaccaacgatgatgcacggtatagcacttacatatttatttggtaatcaagggctagtaacgaaaggaatgtttgggttatttgaaggtatacaaatccctttatatggaccagtaggaattgtaatagctgaagttatgtatacatttccgcaagcctttctcatattactaattgcctttcaaggatccgattatcgtttatatgaagcttctaatatgctaggggcgagtaaaacaaaacaatttttcacggttactttacctagtgtaaagtacggattaattagtgcaatgtttgttgtgtttacacttagtttcactgattttggggcaccaaaaattgttggtggacaatataatgtgcttgctactgacgtatacaaacaagtaattggacagcaaaatatgtcgatgggtgcaacagttggaatgattttattaatcccagctatattcgcatttgcagttgatcgtattacgcaaagaaagcaggcgaatttcttatcttcaaaagcagtaccatacagaataatagctaataagaaaagagatgtcatctcattcatatactgtagtgtgattacatttatgatcattctgttatttgtggcagttggtattgctgcaagtgtgaaagtatggccatataatatgagttttacatttgagcattttaatttttcgagtttaacaggagatggacttgaagcatttaaaaatagcgtaattgtttcagcagttacagcagttattggggcgattttaacatttgtatttgcatatgcaattgagaaaatagaccagctacaattcttccgaaaaacaggttactttttctctatcgttcctttagccataccaggtttagtactcggattaggatatgtctttttctttagtcaaccaacgattcaaattttgggactatcagtaacgaacccgtttcattctttatacggaacaatcgctgtgttagtactagtaaatatcattcatttttattctgtaacatttgtcacggcaacgactgctttaaagaaattagatcgagagtttgagcttgtttcgcagtcgatgggtattccgttttataaaacattctttagagtaacggtaccaatgtgtttaccagcaattttagaaatggtaatgtactacttcgtaaattcaatggtaactgtatcggcagttgtattcctatatgcagctgattttaaactagctgccgtatcaatcgtaaatatggatgatgcaggaaatgtggcgccagcagctgcaatgagtgtgcttattgttgttacaaatattgtagtaagagttgtatatgaatggggaacgaaagcacttcgtaaccgaacttcacaatggcaaaaaagataagtaagaaaggtgatggacagaatgaaaattgaagcagttatttttgattgggcagggacaacagttgattacggatgttttgcaccactagaagtattcatggagatttttcataaacggggtgtagcaattacagcagaagaagctcgtaagccaatggggttattaaaaatagatcatgtaagggcacttactgagatgcctcgtattgcgagtgagtggaatcgtgttttccgacaattaccaacagaagcagacattcaggagatgtatgaagaatttgaagagattctcttcgctattttaccgcgctatgcttcgccgattaatggagtaaaagaagtgattgcttctttacgtgaaagaggaattaaaattggttcaacgactggttatacgagagaaatgatggatattgtagcaaaggaagcagcgttacaaggatataaacctgattttcttgttacgccagatgatgttccagcaggccgtccatatccatggatgtgctataaaaatgcaatggaacttggtgtgtatccgatgaaccatatgataaaagttggggacacagtatcagatatgaaagaaggtagaaatgctggaatgtggacagttggtgtaattcttggcagtagcgagctcggtttaacggaagaggaagtggagaatatggattcggtagaacttcgtgaaaaaatagaagtagttcgcaatcgtttcgttgaaaatggggcgcactttacgatagaaacgatgcaggaactcgaaagcgtaatggaacatatcgagaaacaagaacttattatttcataaaaggggaataggatcatgactgaaaatcactacttattattaacaccaggaccattaacgacaacaaaatcagtaaaagaagttatgctatacgattggtgtacgtgggatgatgaatataatacgatggtgcaagaagtaagagctaaacttgtatcgttagcgacgaaggaagaagagaaatatacaacagtgttaatgcaaggaagcggtacgttttcagttgaagcagtaattggttctgttattccggcaaatgggaagattctcgtttgtacaaatggtgcgtacggtaagcgcattgtgcaaatggcagagatgttacagattgatgtagtggtcagtcaaacagaagagtgggaacctactaatattgtagaagtagagaagttattgcaagaagataaagagattacgcatattgcagttgttcattgcgaaacgacgacaggcattataaatccaattgtagatgtatgtaaattaggaaaacagtatggaaaggttacaattgttgatgcgatgagtagtttcggcgggattgaaatagacattgctgatttacaaattgattttttaattagtagtgcgaataagtgtattcaaggggttcctggattcggatttgtaatcgcaaaacgtgatgaattattgaagtgtaaagggcaaggacgctctttatctcttgatttatatgatcaatgggaaacgatggaaaaacaaaatgggaaatggcgttttacttcacctacacatgttgtacatgctttttatcaagcactacttgaactagaaaaagagggaggagtaagagcgcgttacaatcgatattacaacaatcaaaaactactagtaaatagaatgggagaaatcggatttaagccactagtagatgaggaataccaatctcctattattacatctttcatttatccaaaagagggattcgagtttcaacagttatataacgaattaaagcgttatggatttgttatttaccctgggaaaatttcgaaagtagatacgttccgcattggaaatatcggtgatgtacatgaacaagatattaatcgcttagttgatagtattgctaaaggagctgttattgggtgaaagtattttgcttaggtggagcaggtaaaatttgtcgcgaagctattttggatttagttcaattttcatcttttgagacaattacagtagctgattttaacgaggtagagggccgtaaagtagtagaatggctcaacgaccctcgtgttgattttgtaaaagtagatgtaacggatcacgaggatacggttgcaaaaatgattggttatgacattgtaatggacggtacgacgataaagttaaacagattgtcgacccgctgtattgcagaagcaggatgtcacggtgtgaacttaaatggatttggtgaagaaaatgaatcgcatgctatatttgttgaaaatgaaaagatatgtttacctggatttggcatgacgccgggtgtaacgcaaatgatggcaatgcatgcagcaaatcaattggatactgtagagtctgtccgtgtaagtcacggttcgtatcgtccgattgctttttctgcatcaattacagagacaacgacatatgaatatgatccatatttaccatcgcgtacagtgtatgaagatggtgaatttaagcaagtacctccgtttgcgcgtccgagagaaatagaattgccagagccttatggtaaggcaacgcagtatatcattccgcattctgaaacgattacgctagcaaaggcattagaaaataaaggtgtcaaactgatagagacgagaggaacttggccacagcaaaatatgcaacttgtacgtgctttatatgattacggcatattgcgtaatgatcagattgaaataaacgggaaagaaataggcattatggattgtatttcacagtatttattgcaatcgaaagaagggcaagaaacagagctttatggttatgcacttcatgtagaagtaataggtatgaaaaataatgagaagcaaagacatgtgttatatcatacacatccgttatctgatggttctgttgtaggatgggaaaaattaagagcgtatacgagaaacgtcggtattccatttgggattgctgcagagttaattgcaaatggaaatgtaaatagggtgggtgttgttacgcctgaagaagcctttgaaaatccacaattgatttttgatgagctagcaaagcgcggtattcatattcatgaagaagtttctacttataaagaaaattatagctttgtataagtaaggacgtttataagggagatataaatgaggtgaagctatgtctgtagtaggagaagaaagaaagcgaaccattcttgaaaaggtagaatttaaagggaaagtaaaggtttcagaattagcgagagaatttgctgtatcaacagaaacgattcgtcgatatttagaagaattagatcgtgaaaagaagctgaaaaaagtgtatggtggagctgttcaacttccaggcgctggagtagaggcaccaatgttagaaagagaaatgctacatatagaagagaagaaaagaattggttataaagcagcgacatttgtagaagacggtgatgtcattgcaattgatgatggaagtacaccgcttcaaatggttccataccttgttcatcgtaaaaacttaacgattgtaacaagttcatttccagtcgcaacacaattaatttcttctattaataaaaagatgtttcacggtgaagttttgtttataggtggaaaagtatctccaaagcattcgcgtgtatcagggtctatttctcagcaagtcatacagcaatttcattttcataaagcgttcgtttcgattgatgggttattacctagttttggagtttccagctttgaattagagaaagcgaaattgtcagaggcgatgatgaaattagctgagaaaacatatattttatgtgatcatacgaaggtaggcgtgaaagggaattatcgtatagcagcaatttcgcgtattcaacacgtaatttgtgataaaaaaatgccatatagctttgaagaagaacttaagaagcataatattcagtggacagtttgttaaatacagtgaaagcacataaactcccgcctaatttttaggagggagttttattatctgtaaatcgtaaaataaaagatttgcagttatgcaaaaagtggacacattttctcacctctttcatataatttaccaatacaaaaaaagttggtcgaaggaaagaagggagaacatgtcagaacgaatatataataaacttgtattgtacgcgaatattttgcaaaaaatcggtgtcatcaatgagaaggaaaaaagtgaaattcttcatacgataggtaaaaaagccctttgaataaagggcttttttatttttatatctttaaaaatataaatttaatgtaatattctcattgacaatgataatgatattcattatcatttatttgtggaaaattgataatacttatcaattgtaaagattatatatgataggggatattattttgaaaaaaattacatgaaggcgctagtagtagcgacaacattagcaattccatttgctacgtactctactccagcattagcggcattaaaagttgaagcaaatcaatcggtagcagcagcgagtaatcgcacgtatgatactgagattaaaatatataaggaccaaaaagatgagccatctatggtttctcaatatataaaagatcctaaagtaacgattgcagctggcaaaaaaattgtcactgtaacaatgcaagatagtgattattttcaatatcttagaatagaagatagaaaccagcctggtgtatttcatgatgtgaaggttttgtcagaagataagaggaagaatggaacgaaagtagttcaatttgaaattggtgagtttgagaagaagcacaatatgcaaatgcatatacttattccagctattggatatgatcacaaatatcaagttcaatttgaaattaaagatccaactttaggtaacaaagaaacagagaaaccagatgataactctaattcaggcaatacggaaacggataatccagttgataatcaaaatatgataacagataagaaattaagagagcttgttaataaaaaagtatttaatagaaaagatttaaatacaccaattacgaaagaagatttattacaagtaaaggatttgtttttaaatacgaatgagatacttgattatagtgcattaaaatatatgccaaatttaaaatctttaacagttgcgaatgcgaagataaaagatccgtcgttctttgcgaacttaaagcaattaagtcatttagctttgcgtggtaatgaattttcagatgtaacgccacttgttaagatggataatttagaatctcttgatttaagtaataataaaattacaaacgttgcaccactaactgaaatgaaaaatgtaaaaagtttatttctatcaggcaaccaaatagaagatgtaacagcattagcgaaaatggaacaactagattacttgaatttagcaaataataaaattacgaacgttgctccattaagcgctttgaaaaatgtaacatacttaactttagcaggtaatcaaattgaagatattaaagcgttatattcattacctttaacagacttagtattaacacgtaataaagttaaagatttatccggcattgagcaaatgaagcaattagaagaattgtggatcgggaaaaatgaaataaaagatgttactcctctaagtaagatgacacagttaaaacaattacacttacctaacaatgagttaaaggatattacgccattatcaagtttagtaaacttacaaaagcttgatttagaagcgaattatatttcagacttatcaccagttagtaatttgaaaaaattagtatttctaagttttgttgcaaatgaaatccgtgatgtccgaccagttatagaactaagtaagacggcttatattaatgtccaaaatcaaaaagtatttttagaggaaacagaagtaaataaagaagtaaaagtacctatatatgaaaaagatggtgaggtttctacgaaaatccgtctgaagagcgataacggtacgtatagtaatggtgtagtgaaatggagtacaccaggtgagaaaatatatgaatttggtgtgaaagatccattcgcggatacaggaattttctttacagggtctgttattcaaaatgtagtagaaagtaaagacggtaatacgtctaaagaagatgagaaaacagaagtggtagaatttaaagatgtaccaaagggacattggtcagaagaagcaattaattacttagcgaaagaaaaattatttataggctatggaaatggtgaatttggatttggtgataacattactcgtggacaagtagctcttctaatacaaaggtatttaaaattagaaaataatctagtaccaaaaacggcatttacagatacgaaaggaaatatgtatgaaacggctattgatgcagtggttcaagctggaattatgacaggctatggaaatggtatgttccgtccagatggagtattaactcgatatgaaatgtcagtagtattacaaagagtatttcagttaaaagaaaatgaaaatagtgcagagaattttaaagatataccaaatgaccattgggcgaaaggatatgtgaaagctttagtggataataaaatatcaaaaggcgatggggaagggaattttttaggagataatttcgtaacacgtgaacaatatgcacagtttttatataatgcaataaagaaataaagtgaaactttaatcagtgggggttttgttcattccccactgattattagccctcactaatcgggctgcccgttaatgcggaataaaaaatgaggaaaatacgctattctttaattaaagagtagcgtatttttatgtacaaaatgaaataggaaatagataggagtatagacatatgaatagcctattttaaagaagaaccacgaaactatattgacaaaaaagcgttctcatgtgataattcaattaatttttagaataatcaaaaaatattccttttacatagaaaggattcgaaccttatatgaatattatgccgggggtgacgaaatgttattttttctgaagaaatggaatgaattaaaagatgtgaaatctgaattggcacttcgtgattggttttatggtaccaaaattagcttatcgctatgtacgtcaaaagagccgttaacattcttagtaaatgttgaaggaagagataaagggctattttcggaagaagattttattgtcgtaaattgcatgtgcgagtcagtatttgaaaatgaagaaaaaccagctgcagagtcatttatgcatgcggatatttataaaaaaagtagtgcaggatgtattttacaagtgcagactgtagatagtcatttaatatcagagttatatggggaagaaggagaagtaacgttcgataaacgcagtgtggagcgtgttttcggaaaagaaggtataacagaaatgacaattccaattgtagaagatgaaaaaaaattcgctgatttattagaaaggaatgttccgaatttcattgaaggtggaggagtagttcttgttcataattacggcatgattgtgtggggaaaaacgccagaagaggcgaaaaaatggctagagggtatagaatatttaatgaactatcatgtaaagttattaatgattaagggggcaaggagctctgttatataaaaatggatgtgatatagctacaagttaataaataaatgaaagcgttttaaaaataatttcactcataaaatataggtctccttattatatatagattacatgttgacatgtaaggaggaacatattttgcgagttaaatatcattttctgccaaagcagcaagtaacattttgcaaaataaatgattctggtgaagaggcactgcaaatgatgaacgaaacgggatttcgagccatcccggtattagcagaagatgagaagaaattcacggggattatttataaagtagatttattagaaaaaaaatgcaatagcggattagagcatgtaagtgcaggggatatgctctacgattccaatgcatttatttttgaaaaggattccttcttcagagccttttatgtaattcgtcggcttccgtttttagccgtgctaaatgattataatgaatttgtcggtatgttaacgcattcgaatatatttgatgttattgaagattcatttggtatgcgaacaggtggttatatattaacaattgcaacacaagattgtaagggaacgattaaagagcttgggacattgttaaaagcatataatatcggtggcctatttacgctagataacggtgatcaatatatccgccgcgttattgtaaatatatcagatgagttagatgaaacaaaattaaagcaattaatcggaaaaatagagaaaaaaggattcagagtgagtcacgtagattatatttaagttaaaaagaaaagtacctatctgttatatatagataggtacttttttgtcccactatttgtgggtagtaaaatccacgcctcaaaatttggtgaaagcaaagaagttaggtgggcgggtgttacctgtaaaagcccaattggtgaggctgattatatgtgagtaatgaactttattttgaaacaggaggcggggataatgctagatcagataagaaaataaagtctgcatgctcacgaattttagggatagaagtttcaataacgcgtgatgtaatttcacctggggggcccacatgcccgatagctaccataataggtttttcttgaatttttttgatgagtaattgggcttgttttgaaatatgtcctgctgtatacacatcatcaaaaaatagttggttttcaataataggaactcctaattcttttccgatttttgggacgacactattaggattcgttttactatctaagtaaaataaaccgtgttttttacaagcagcaagtataaggcgaacaattctttcatccgctgttacttttgaccccatatgattgttcattccaattgcatgcggtacttcttgaatggcttgttcaagtcggttgtttatttcttcatcgcttaaatcagttgtaattgctttcggcccaagccattcttttttaccttttataggttccattggcatatgtataataacttcatggcctttcttatgggcagctattgcgtcttcttttgtggaaggaagaaaaggcataacagcaacagtgagtggaatgggaagtgataacatttgattagtccccttcatattattaccgaaatcatcaatgacaatagcaactttattcgtatgagcatttgcttgaataggaaataagaaagacggtaaaaacaaaacaatgatgaataatgcaatcgtatattttcgcatataaatatttcctttctattgttatcctgctatttgtgggtagtaagactcccacctcaacattgggctggataggtgggagattaactgcctacccgattggtgaatgctaattatcagtgggggctgaacaaaaaaacactgattaaagtttcactttatcaatcatcattatgttttgcttttttatataaattaaacaaaaaatgtcgaagaaaagtaggtggaaaattaagaatccccggtttacgtagaatttataaaaaaagaagatgaaaaaaatgtctattattgcgaatgtatttacaaagatagaataatttgtaataattctcaaagtgagggtaaagatttgtaaattacagggagaaaatgttaaattttctgattcttcaaatttgcatatgattaagtagttaaaaaaagtcaatggagaagtgaagttaagagcatggaagtataataagggggatatggatgtttactgtaaaaaggaagtacacattagaaaagctttcacgtgatattcatatgaaacgtgaagaaatgattcaactaggattaacaagtgggctaaatagtagggagacaattcaagttagtcaagaattggacaagcttattttacaatatcaatgttataaagaaaaacaaacaccgaaatggttttcaattataaaaatacctattttccaaatcgggtatgaaggaaaatcaaataatttttggcgaatgcttgtggctggttttatgaaataagtataattacccttataggataaggataattatactatgtgtaacggaatttcgatatgaactgtcgttccttcattttctgtactgtcgataaaaatatgcccattatacatctctacaattcgtttacatatgacaagtccaagacctgttccagtatctttattagtaaagaacggatgaaagaggtgtttttgaatatgttgcggaatcccttttccagtatctgtaatatgcagttgtgcgtgtgtttcattgttttttactacaatggttagtgtatcattagaagtcatggcctcaattgcatttttggtaatgtttaaaaccacttgtttcatatggtctttcgaacaacggatatgaacaggatggtctggcaaatgtaaatggaatacaatgttatgtaaattcgcctcagattgaataattaatgctacctcatttagaattgttcttacatcatatgtttgttcgatgatggcggttggctttcctagaataagaaattcacttacaatttcattgattcgctctatttcttgttcaattacggaaaagtagaactgatcttgttcatctttatatttctcttttaatagagcgacgagtcctttaattccagtaagaggattacggatttcgtgtgctgtactcgctgcaaaagttccaactaattcaattttctgtagttcattttgttgtctttcaagttttgtttgacgttttaacaacatatattgagcaagcaaaaataaaatagacattaaaaataaagtagctatacactctattgcaacccactggtataaggttttttgatgaatgggtaatggagaaacagagaccttccaatttaatctttggagtggggtagtaagcatattagaatgcgtatcacttgtgtcgttattatcatcggttagaaaaactacatcatgtttatcagttacctcaaaatggtattgtggtttaatggcatttaaagaagaggaaatgtaatcaaagcgtaaactagctaataataatcctgagagctccttctgtttattaaatatgggggcagcaatcataatagctttatgtccaagaacgcgatcagtaatgactgatgatacagtggtttttttagtttggagcgcgtcttgaatatatttacggtctgaaacatctataggctttgattcatcttcagatgcgattgtaatgactccttctggtgtagcgtaatatagaccagaaaagcgtgcatcgtttccatctgtatcatgtacaatttgtttaatgccatttatattaccagtctcggtgcctacaacttttgcaagcatgtctaaagcagaaattgcttcaccaagatgatgatccaaataatctctatataaaaagagaactgtatgagcagataatttgttttcctgtttcattttatatgtatgatacgaataaaatgtagcaccaatccctattgtcggtaggataacaagcaatatatatataattatgctttggaatttgactttcaaatgtggtactccttctttttttattatcattatatataaactatgttaaaattgtcatgtttttattcaagaatgatttttaatatattaggggagaggaaatggatgagtgaatgctcattcggaattcacatgaagtatgaagtggtattttctttttattgctgagaatttaagtgaagggttgaaagttgtatgacatcaaataatgaacgagaagatatttctcaatctttaaaagtatttattgcattatctcgtgtacatcgttctgttatggatactacaaataaatctatacaaagtaacgggttaaatccaactgaatttgctgtattagaactgctatatcataaaggcggtcaaccactccagcaaattggtgagcgcattttaatagctagtggcagcattacatatgttgtagataagttggagaaaaagggattagtaaagagaatcccatgtccgaatgacagacgtgttatttacgcgcaattaactgagtctggcgagaactttattgcttctatttttccggggcatgagaaagttatacatcagtcttttgaaatgttaacgaaagatgaaaaagatgaattacttgatttattaaaaaaaattgggaagtatgaaaaataatatgttccaaaggagctttggataaataaatccaaggcttttttatttgtaatgaactcatggcagtcactgccgaaatttgttggaaattaagaggggattcgagaatacgtattgaattataataaaggtatgtaatggagaggaggctcgttcatgtcatttaaagactatgaatataaacgcccaaatattgaagagttaaaagagaaatttactgttgctttagagaagtttgataacgcaaaaactgtagaagaacaaaaacaagtcattcattcaattaatgagattcgcaacgattttggtacaatgggaaacctttgttacattcgccattctgttgatacgacggatactttttataaggaggagcaggatttctttgatgaattctctccagttgtacaaggatatggtacaaaatattataaggcactcattaattctccatttcgtgaagaattagaggcgtattatggaaaacaattatttgctctagcagaatgtgatttaaaaacatattcagatgaagtcgtgaaagatttacaattagaaaataaattatcatcgcaatatacacagttattagcatctgcaaaaattgactttgctggagaagaaagaacgttatcgcaactgattccgtttatgcaaggaaaagaaagaagcgaacgtaaagcagcaagtgaagcatactacggatttttagctggaattgaggaagaactagatcgtatttatgatgagcttgttaaagtgagaacgaaaatcgcaaaatctttaggtttcaaaaactttgttgaacttggatatgcaagaatgtaccgtacagattataatgcggagatggtggctaattaccgtcagcaagtgctagattatatcgttcccgttacaacggaattaagaaagcgacaacaagcacgtatcggtgtagagaagttagcttattacgacgaaaactttgagtttgctacaggtaacccaactccaaaaggagatgcggattggattgttgatcatggaaagacaatgtataaagagttatcgattgaaacagatgaatttttcaatttcatgctagataatgatttattagatttagttgcgaaaaaaggaaaagctggtggcggatattgtacatatattgagaattataaagcgccatttattttctcaaacttcaatggaacatctggtgacattgatgtattaacacatgaagcaggtcatgctttccaagtatatgaaagtcgtaaatttgaaattccagaatataattggccaacatatgaggcatgtgaaatccactctatgagtatggaattctttacatggccatggatgaagctattctttgaagaagatgcagataaatattacttctctcacttaagttcagcacttctgtttttaccttatggtgtatctgttgatgaatatcaacattatgtatatgaaaatcctgaagcatcacctgaagagcgtaagacagcatggcgtaacatagagaagaaatatttaccacatcgtgattatgaggataatgattatttagagcgcggtggtttttggcaacgtcaagggcatatttatagctcaccgttctattatattgattacacgcttgctcaaatttgtgcgctacaattttggaaacgtgcaagagataatagacaagaggcttgggaagattatgtgaatctgtgccaacaaggtggaagtaaatcgttcttagaattagtagaagttgcaaatttaacatcaccatttgctgaaggctgtgtgaaaagtgttattacagaaattgaagcatggttacatgcgattgacgacacaaaattgtaaaaaacatgcgctttttttcacatgtttaacatcgacataatgggaaaatgatgagataataaaagaaaattcagaatactaaagaggtgtttctaataaggagcacctcttttcacaaacaaaaggggggaacaagtatgcttcaatctaatatggatgtaagtttagaaagtttagtaaactcattacagtctactcgaagcacgctattatcagaaattgaaatgttaaatgacacagaagtgaatgtaaagccacgccgtgataaatggagcattattcaaattttacaccacttgcatttagttgaacaatctgtcacgtctgcccttgtatatgctttacaaaaaaaggaaagaaacatgactccatttaaagacctccaacttacgcttgatcgcacacataaacgagaagctcctcagcaaatgcaaccaacagaaactttaatgaaaaaacagcaaggaattcaattgctagaacattcacgccaagaactattacacgcgcttcatagtgttatagatgaaaaagatttatttgaaaatggattaaagcatcctgtttttaatgatctgaatttgtatcaatgggttcaatttcttgatttgcatgaacaaagacatcttacgcagttaaaagaggcgaaacatgcaattttgcaacgctaaagtggaagaagtgggaaaccacttcttttttgatacgtgcatagttttctttcttattttggaatactacatggagaaagaaaagaaggagttgaaaaaacatgtctaagaagaagcgagaagaagagcgcgcctggaaagcacgtaaagaaaatcaacaaccgcacggaaaagtgaaagcttttgctgaattagttgaaggaacagaaaaaacgtgatgagtatttcatcacgttttttgtatgagtggaaaagttaataaaaaggttgtaccgattcctttttcacttataatatcaatttttccattcatagcttgaacaacactgaatacgaccatcattccaagtccagtacctttttctttcgttgaataaaaaggagagccaagacgttttacttgttctgaatccataccgactcctgtatcttttatatataactgaatatgcttatgatcaggaactaatgtgaaataaagatcaccgccttttggcatagcctcaatgcaattttttaaaatatttaataaacattgatttagtttttgcttttcaccagcgataaaaaaagaagtgctttgctttatataatgagtacgtacatttgttaaattagtaagcggtgtaattaacgacaatgcatgtagtaattcttcttctaactgtaatgtttgttctttttcaatgcttggtttagcaaaggttaaataatctgtaagaacatgatttgcttgttcgatgccgttaatggcaatgtcgatatacaattttcgttcctgctcagtacaggtatctgattgtaacagttgtaaaaaacctttcgttgaagttaatggattgcgaatttcatgagagatagacgctgccatttcaccaattaaatgaaacttttcagcatttataagttcgttttggagacgaacttgagtttgtaatatgtgcagtaaatataaaattagaatcgtaccaagcattgaacataactcatacacaataatatgcagtatataatcagtcttatttgtaacctttgaaaggaagaagggtatccaactaaatccgtatgtgagactgtagataatagcaagtgttatttttatacgattagaagtttgattaaaaaatttatatgttaatagtagaacaataaatagaagaacagaaccgataagagatgggaaaacacctaccccacctaataataagcgatatatgtttaatacaactaagatagaaccaccagcaataggccctcccgttaatgtaccgacaattaatacaatatggcgcatatcaaattgaaaaccattatttgtttttgctgcaaatgtaatacagagtacggtagcaaggcaacagagtacaatgaatatagctgaatttaatttaggagagcgtttccctttttgattccaaaataaatgatatacgagcattgtaatcaggatgaataatatatttaaaaagagataaataataaaggatttcagtgggatgcctcctctcttcttagattaaattaatcatactataaaatgaaagaaatgaaataataaatagcggaaaaatcagaaatttttacgctagtatacaatatgttacaataagctgtgtcaatgaaagaagaaattccgtgcatcgcgcgggagaggttcgcgaactccctctataaaaaactatggaaacaacaatatccttaggtattgttttgtttttttattgtgacagttcaagaacgttctttcttcttatttatagtagagaaggagaatgagtgaaatgaaaaaagaaaaagcagttgttgtttttagtggaggacaagatagtacgacatgtttattttgggcaatagagcagtttgcagaggtagaagctgtaacgtttaattacaatcaacgtcataagctagaaattgattgtgcagcggaaattgcaaaagaactaggaataaagcatacggtactagatatgagtctattaaatcaacttgctccaaatgcgttaaccagaacggatatggagattacacatgaagaaggtgaattgccatcgacatttgtagatggacgaaatttactcttcttatcatttgctgctgtattagcaaaacaagttggagcacgtcatattgtaacgggtgtatgtgaaactgatttcagtggttatccagactgccgtgacgtgtttgtgaaatcgttaaatgttactttaaatttatctatggattacccgtttgtcattcacacgccacttatgtggattgataaggctgaaacatggaaattatcagatgaacttggagcatttgagtttgttcgagaaaaaacattaacatgttataacggaatcattggtgatggttgcggtgaatgtccagcatgtcaacttcgtaaagcaggattagatacgtacctacaagaacgcgaaggagcgaataactaatggataacttttttggatttcgcatcgtagagaatttgcaaaaaatggacaaggatattcagcgtaaacaactcaaataccataataaaagagtaatggtcagcaaggaatttacatttgatgcagcacaccatttacactgttatgaagggaaatgtaaaaacttacacggtcacacatataaagttgtatttggaattagtggatatgtaaatgaaataggtcttgcaattgactttggagatataaaagaaatttggaaaaatgaaatcgaaatttatctagatcatcgttatttaaacgaaacgttacctgcaatgaatacgactgctgaaaatatggtcgtttggatttatgaaaagatggcagaagcactaacaaaagagaatcgagtgaacgaatataaaggagctcgcgttgaatttgttcgtctatttgagacgccgactagttatgcggaagtaagacgggagtggatgcttgatgagtaaaatccctgtcttagaaatattcggtccgactattcaaggtgaaggaatggttgtagggcaaaaaacaatgtttattcgtacagctggttgtgattatagctgtgcttggtgtgattctgcttttacgtgggatggatcagctaaagatcaaattagacagatgacaccagaagatatttgggatgagcttgttgcaattggaggagaaaatttttctcatgttacgatttcaggtggaaatccggcattgctgaaaaatattgagtttcttctttctatattaaaagaaaatggaatgcgaacggcaattgaaacgcaagggagtaaatggcaagattggttacttcaaattgatgaggtaacaatttctccaaaaccaccaagttcaacgatgaaaacagattttcataagttagatgctattattgagaaactagcaggaaaagatattagtttaaaagtagtagtattcgatgatcatgattttgaatatgcagttaagatgcacgaacgttatccaaaggtaccatttttcttacaagtaggaaacgatgatacaaaaacagtggatgatgcgatgcttataaaaaatttattagataagtatgaatggctgattgataaagctgtaaattgtaaagagatgaatgatgccaaagtattgcctcagcttcatgcgttagtatggggaaataagcgcggcgtataacgagaagggatgtttaaaatgacaggaagattagatgaagatttaaaagatgtaacattactagggaatcaaaatacaaaatatttatttgaatatagcccagaaatattagaggtatttgataataatcatccaaaccgtgattattttgtaaaattcaattgtcctgaatttacaagtttatgcccgaaaacaggacaaccagattttgcaacaatttatattagctatattccagagcaaaaaatggtagagagtaaatctttaaagttgtatttatttagtttccgcaatcatggtgatttccacgaagattgcatgaacgttattatgaacgatttaattaaattaatggatccgcgttatattgaggtatgggggaaattcacaccacgtggtggcatttcaattgatccatactgcaactacgggcgcccaggtacgaagtatgaacaaatggctgactaccgcatgatgaaccacgatctatatccggaaacaattgataatcgttaatagaaagaaagggcctgtatactatacaggccctttctttctattatattatgcattttgattaatgacagtatagtttttatgacttacaactgtaagaggttccatatctagttctctaaaattcttcataattgttatatcaacaataacagagttttgatttactttttgaacacggccttgcattccacctttaaattcgatgatatctccagtttctgcgatctgcataagcaactctccttgttacagttttcccaaaaaaagaataaatttgggtttttttatttcctcctattttgaaccatatttcctactttgtaaatgtttccaaagtaaaaattcgaaaaatattcactttttgtaagaaaatatgtagaaaatccatgttttttagaaaaaatagcaaaaatgcaagaatctttatatcgaggtataatgaaaaagtagaataacctgctgaagtgggagaaattagaggcggtaaaatgatgtttgaatttgtggggagtgttatagctttaattttatttttattttcttatatgcatttaaaaaagattcgtcaatatgatacgagtacatattttgatgggatggatggtatccatgcttcgataacacatgatagtggtggggagatgtaaaggtatataactttattttcttgcgtggtatgatgtttagaactagtgcataatagagttcataagtgatgaatggagagtgaaaagaatgaagatttcttttattcgtcatggttgtttaagtcgtataagagaaccgatgacaattaattcatttcacgaatggatgaaacagtatgattccgagtcaatgatacaaaaagctaaaatgccgatagaaacaatagaggcaattgaagcagcgaaatttgtcttaacaagtgatcaaaggcgtgctgtacaatcagcagctgaattgacggattctttatcttttatgcaaaattctctttttagagaagctgaagttccttcatgcttttttgctccgaagtggttgaaatgcacaattaaggtatggatgttcattggacgaacattatggatacttggctaccataaagatgttgagtcttataaggaagtaagagagagggtaaggcaagcggcttacctgttacatcgttatgctctcgtacatggaagtatagctcttgtaggtcataattatgtgaatgtaatgattggtgccgaactgagagcgatgggatggtctggttctcctattttgcacagagagccatggggatgtacaacatatacgtttcacgaggcgatggatggaaatatattaaatacaaatttaacataaaagcacacgatttatataaatcgtgtgctttctttttaagatatagaaattttgacgtttaatggttttacgagatgagcataaggttctcctactagcataacaatttcatcttttttataacctaacttttcgtatagtgaataggcgcgtttgttttctaaattaacaagtaaagcgatttttttatgccctttttcagttgcatagatttcggcagcttcaattaatttagaacctataccttttccgccgtgtgcacttgaaactgataatgtatcaatgtaatactcatcaagctcagcttctttttctaacgtaattgattcatctttatgtaatgctcttaagtgatgtacaattggtgcgtcaagctgtgttgcttcactaccgtgataagcgacaataattccaactgcactctcgtcttgttcatagacaaaacagttttcgtagctcagacggttattttcttttgagaaccatgtctcaagtcctagtaatacttctgcttcaactgtgctacctgtgattttttcagcaatttcatgcagagcattatacaataaaggagctattgccattgcatctgtcttttttgctttccgaatcatagtatccctcctagttctatttgtatattgtagcatagtggtatggaactttgcataattgaatgccgaaatgtttgatatagagaagtagctatgttagtatatgatatttagtggacatatagtaaaacaatattgtttgcgaaataacgaaaataaaatcatggcataacaacgagataaagtgaaacgttaatcagtaagattttttgttcattctacgactgattagtagtcaacaccaatcggactacctgcaaatagcgggataaatttacagttgttgacctatagaatataagataaaataaaatattgcagagaggtgaaatacatggataaagaattagcaaatacaattttagatcagctaaaaaatggtgaaataaaggagtatgttgttacgaaagatgtattttatacgttcagagaagttgttgtaaatagagaagactttaagcatttcattggtaacgcacagcgaggcgggcaagtgatttatacatattcagaaacgccacgttcataaaggagaattttgatcagcagggcatctctcactgattagtagccttcaccaaacggacgtttcatgcgggataaataaaagataaaggagaggggaattatgggcgattttaaacaaggcattttaccacattgggattatatgtggaaagatagagccggcaatcgatttatgggaatggttatgtatccagagaaacgaaaatgttcagcaaaaatgcttcagaaaataaaaagagcatatgaagaagcaatagaaattaaagtaactgtacaagttcaacatacatatcagtacgtagaaggactgattgtatactttgatgaagaggctcctgtatgtacaatgcttgataaagatgaaaatccacatcatatatttgtaaaagatattttgcgcattgagtactctgaataaacttttcataaataaattgaagttccataataataatctttttctataatagttatcttttagtatgtaacgaaaaacgaaagtatatgtataatatatttaataaggtaaatttgataaatgtaatcgttttttagagcagattatagtttcatatctgttcttttttgcgtgatgctggagaaatatatttcttcagcatctaccgttttatgacaaaatatattgttaacttttttaaaaataaggttaaattcgttgacaacttttttgaaaagcactttattgacatgagttttagaatgttgtttcatagtcattgtattgaaaaaaaacggctatcatgtcgaaaagtaaaagttaaaaaaagaaagaatttatacatatatcttgtgtcttattttgaaacgtaatacaatatatagagaaatcaagaacaacatatagagaatatagatttgagagggagggtcggaaatgttagttgcatatgattctatgacaggaaacgtgaagcgtttcattcacaaattaaatatgccggccgttcaaattgatgaagatctagtaatagatgaagactttattcttattacgtatacaacaggttttggaaatgtaccagaacgtgttttagactttttagagcgcaataatgaaaaattaaaaggcgtatctgcaagcggcaatcgtaactggggagacatgttcggtgcaagtgctgacaagatttctactaaatatgaagtgcctattgtatcaaaatttgagttatctggaacaaataacgatgtagaatattttaaggaaagggtgcgggagattgcgacacattgaactgaataatgaaatcacgcaaatgcaggacggtttttatcagcttcataaagataaagaggcattagaagtctttatggaagaagctagagagaataccgttccttttaatagcgtggcagagcgaatggagtatatgaaagaacatgattactattacaacgttctggacgagtatagcttggaggaagtagaggaagtatataacatcgcttatggtgaaaacttcgagttccaatcttatatggcagcatctaagttctacaaagattatgcgttaaaaacgaatgatcaaaaacaatacttagaaagctatgaagatcgtgtagcaattgtttcattatacttaggacgcggtgatgtttcgaaagcaagacaattcgcaagcatgattgtaaaacaaaactaccaaccagcgacaccaacctttttaaatgcgggaagaagcagaagaggagaaatggtgtcttgtttcttgttagagatggatgatagcttaaattcaattggctttaacattaatactgcgatgcaattatcaaaaatcggcgggggagtagctttaaacttatctaagctacgcgcacgtggtgagcaaattaaaggtatcgacaacgctgcaagtggcgtagtacctgttatgaaattgcttgaagattcgttttcatatgcgaatcagcttggccaacgaaaaggtgccggtgcagtatatttaaacattttccattgggatattattgaattccttgataccaaaaaaataaatgccgatgagaagagccgtattcagtctctatcaatcggaattatcgttccaagtaagttctttgagcttgctgagaaaaacgaacctttccatgttttcgcgccttatacggtttataaagaatatggcaagcatttagatgatattgacattgatgaaatgtacgatgaattaatgagcaatccgaaagtgaagaagaagccactagatattagtgcacgtgatatgcttattaaaatcgctatgattcagcttgagtctggttacccatacttaatgtttaaatcaaatgcaaataatcaacatccattgaaggatattggaactgtgaagatgtcgaacttatgtacagaaatcttccagcttcaagaaacttcagaaataaatgattacggtacagatgacattatccgtcgtgatattaactgtaacttaggatcgttaaatattgtaaacgtaatggaaaataaagaaattcgtgaagcagttcatgcgggaatggaagctttaacagctgtttctgatatgacgattattccgaatgcaccaactgtgaaaaaagcaaatgacgagcttcattcagttggacttggagcaatgaacttacacggatatttagcaaaaaataaaatcgcttatgaaagtgcagaagcgaaagaattcgctcgtacattctttatgatgttaaattactattctattgagaaaagtatggaaatcgctacagaaaaaggcgagacatttaaagacttcgataaatctgattatgcgaatggcacatacttcgaaaagtatgaaacgacagattacagtcctgtaactgaaaaagttcagcaactatttgaaggaattcatattccgacaaaagaagattggacaagtttaaaagagcaagtgcagaagaatggtttatacaactcatatcgtcttgccattgctccaacacaatcaatcagttacgttcaaaatgcaacttcaagcgtaatgccgatcgtaagtcaaatcgaatcaagaacatatgcgaatgcgacaacatattatccaatgccgtatttatcaaaagatacgttctggtactataaatcttcttacgatatgaatcagtttaaattaattgatttaatcgcagaaattcaagaacatattgaccaaggaattagtacaattctttacgttaatagtgatatttcaacacgtgaattagcacgttactacatctatgcacataaaaaaggcttaaagagtctgtattatacgagaacacgtaaattaagcgtggaagagtgtgtggcttgtaccgtttaatggcatattgccatactaaatgaataacccaatagtatgagcagggttatgaaccctgctcatacttggtttgttctactaaacggttagcttttcattgttagatggaaatttaaccgttcagtagaacaataatagatataggggtgattcaatgcgcgctgttaactggaataaaaaggaagatgatttcagtttaatgttttggaagcaaaacatcgctcagttttggacagaagaagaaatcgcggtttcgtctgacaaaaatacttgggtgcaattatcgaaagaagagcaaattgcttataagcgtgtattaggtggtttaacacttttagatacgaaacaaggtggcgaaggaatgccacttgtacttgttcatcttgaaaatttacaagcgaaaagtgtattagctttcatgggagctatggaagaagtacatgcgaaaagttatagtcacattttcacaacattagctacagaagaagaaattgatgatatttttgactgggtagacaatcatccgttacttgagaaaaaagctggtattattactagttactatcgtcgtttattaaagcctgaagtaacgaaaaaagagttatacatggcaatggtagcaagtgtgttcttagaaagttacttattctatagtggatttttctatccactttacttagctggtcaaggtaaactgacggcaagtggtgaaattattaaccttattatccgttaacttatggcggcttttggtagagataccaattgaaaaacccttttaattgctgggaccccctagtgtaaatttatctgtattattattgatgaatatatgcattcaggttattctctaactatcaatagatggaaaggagaatagctgatagggcaatcagcagcgaagcctttatctagcgataacatgtacggaagtatcagacatcgaaaactgtataaacagtggtgggtgcgatacgtagataaaggaacgttcaacgactatcccaatggcggtgaaattccgcaagaggagtagggccaagcggtgggtgagaatcccttaaatcgaaatggagggctacctgagaaggtagatgatatagtctcttcttacaggaaactgtaagctgtataaacggcataggagtagcgaacttatgtgaaggtaaaggatgagtcaattcacggcgtattcgtcggtattttagcacaacaaatcttcgcagaactttctgtagaagagcaacaagaagtgcaaaaagaaacacaagagttattaatggaactatatgaaattgaaatggcctatacagaagaaatttacacttctatcggtcttgtagaagatgtaaatcgtttcgttcgttacaatgcaaataaagggcttatgaacttaggacttgagccgaagtttgaagaagaagaaattaacccaatcgttttaaatggtttacgtacagatacgaaaaaccatgatttcttctctgtaaaaggaaatggttacgtaaaagcaacgaacgttgaaaagttagctgacgatgacttcgtgtttaacttttaatataggattataaggaaaagctgtcttattgattgataagacagcttttctttataattttgtttacataacactattatttttgtatagcgatttatatttgggaagttctattcggttaacggatagaacttttttgtaattaaatgggtatttacaaaccttttgtatcagtgtattatttaactagtacaccgatacaaaaggagggaagaaatgaaaatagagttttctccaaatacaccaatttacattcaggtaatggaatgcataaaaaaagagatcgtaacaggacatttattgcctggtgataaaattccctctgtccgtgaattagcgagtgaattacaagtgaatccaaatacgattcagcgtacatttcaagagctagaacgggatggagttgttgtcacacgtagaggaatgggacggtatgtaacgaatgaaggggagaaaattatggagctgcgaaaagagatggcgaaagaattacttcattcttttatagatggaatggacaatttaggtttttcagaagaagaaattcttacaattcttcgttcttcattacatgataagagggaggagagccaatgacagagctattgaaaatagaaaacttatggaagagatacggattaaaagcagtgatccgtgaattaaacatagagattacggaagggaaaatcgttgggcttgttggagataacgggagcgggaaaacgacgttattgaaaatgattgcaggcttgcaacacccttctgaaggtagtattacaatagacggtaaaaaggtaggattacagacgaaagaaatcgtttcatttatgtccgataagccagtctttgatgattggatgactgtaaaagatgctttatttttttaccgagatttttataaagacttcgatattcaaaaagcggtagatacgattgcagaatttaaaataccgttagaagaaaaaattacagcattgtcaaaaggtatgatagagaagctgcaaatcattttaacattttctcgaaaagcgaagctatacgtactggatgagccgttgggcgggatagatcctctttctagagaacatgtattggatttaattctacagttctatagggaagattgtacgatattaatttccactcacttaataaatgaaattgaaaatatttttgatgaagtgatctttttaaaagatggagaaatggttctatatgaaaatgtagaagaaattcgttttcagagaggaaaagcagttcatgaattgtttaaggaggtgtttagtaagtgaagtcagtactttcctatttatggaatgtaaataagaaaagatatattgttacttttttattctttgtgctaattgaagctgtgttattttcacaaatgattgtaagaaaaagtgatgcggctatcagtagacaagagggtatatttggaatcattatgattatatttttcttttatattgtttatatgtttatacaaacaatgaaatcatattcacgcttactaactaatccaatgttacgacttacagcaatatctgggaaacaatatgtaatttctatgcttattttctcatttatcgcaatggctatatggtatgggatatgtggaattcttttctacgtaagttatgtattagcttttcctacgacttctgtatatgtagaggcaaaagagattatgcaagtaggcataattaataatttaatatatacgataagcgatttatttgagtttttgtttagtgtgttacaaatcatattagtaattactctagttaagttacttaccaaaaagaaaaaggcgcaaaatatactgatcgttattatttttctagtaataaatatagcgattactttagcgacaaccttgctaggaaaattagctccagctttccaagtattgcgaagagtagaatatcatagtgaaagcaagagtctgtttattaatatgtttcaagaaaatggatttaacatttttaatataagtttcatggtaatggttagtgctctaataatatatgtaattgcttatattatcgataaaaaactagaagtctaaaggaggaatcagcattgggaaacgtagtagtaaagttagagaatgttcgaaaaaggattggtggaacggaaattattcgtggtttatcatttgaggttcgtgaaggagaagtatacggattccttgggccgaacggtagcggtaagacgacgacgatccgtatgatgacaggtcttatttcaatgacagagggcgatattacaatttgtggacatagtattcgctcggagcgtgaaaaggcactagagcaaattggagcgattgtagaaaatcctgaactatatgattatatgacaggaatgcaaaacttaaagcattttgcgaatatggccattacaccaattagtaaagagcgcattgctgagattgtaaagcttgttgaattagagcatgcgattcataaaaaggtgaaaacatattcacttggtatgaaacaacgtttaggaattgcacaggcattacttcatcagccgaaaatcttaattttagatgagccgacaaatggattagatccagctggtattcgccaaattcgtgattatttacaacgtttagcgaaagaagagaatattgctgtaatcgtatcaagtcacttattgagtgaaattgaattaatgtgtgatcgcgttgttattattaaacaaggtgagtttgtacaagagtacaacttacatgaaaaagtgaaacatgatgaggcagtcgttgtagcgtttgaagtagatgaagttcagaaagcaaatgaaatcattaaaggcaaagcaaaagggaatgtaattgtagcatctgtaacaaaagacaacattccgcaacttgtaaaaaaacttgttcatgctgatgtgcttgtatatggcgttactgttcaaaataaaactttagaggatgagttcttagcgattactgggggagtgaaagcgtaatgtttaaattaattcaaaatgaatttttaaagttgcatgcgaaaaaaggtatgtatattttaattggtgtcattgcggcactcgaaattttaggtactttagcaatgttgaagtggggaaaaggtgatgagtttaagggggcatatttagattatgcaaactcagagattggcttaattgttttatttacaacgatttttgggattacacttgctgcccgtactcttactgatgagttccaaaaaggtacaattaaacaattgttaatccgtccaagaaaaagacttgcagttttattttctaaatatattacagtgttattagcaatgttatttatcgtattagctggtatgctaattgcaatgattattggcggtattgtaatggatggtagtaaaacagaattaacgttaggaatcgtaatgaagtcaactttatatcaactactttcaccgttcttttttgcaacacttgcatttttcctagcaaatgtctttagaaaatctgtattaccattaattattacgatgttcctattcttcttacaaggtgcaattaatatggtattaataatgtttgcaaaaggtgtagcgaagtttgtagtattcaaccatttggatttaagagcttacgatagtaataaattaatcaatggtggaatggaaccaacatttacagaatttacgtttacaacttcattattacttgtagttgcatactttgttgtgttacttgtagcatcaagtgcattattccaaaaacgtgacgtattataataaaagaaatccccgcttgtaaaaacggggatttttattacataaaattcacttagattgcaacaagtatgcaatttttcggtggagaagaaagtggtacaatctcaattactgaattacaagcgcaaagtaatttatggattggtattggtcttacagttgttggattactttggttaattccttatgtttggaaacaatggcgtacagtaaaagaagttggcgtgccacgagtacgttttataaatgagcaaaaagtagtgagttcatcacaagaaaatgaagtgtatagtcaagtgatcgtaaccgatagattgatggccatagagttaccagatgaggctgtaaataagcttcggttagaagaaaatgattatgtaacagtatctgtagaagaagataaaatcgttataaagaaagcacataatagataattaaaaagtagctccttaggagctactttttaatttgtaataatttctacacgaaaattattaccgttctttacatatttaatatctgtaacagtgcggaccgtctttaaaatctccactttttcaccaattcgtgggatggtcggaacattgtcccaaataccaagcaagtcatctaattgtgccgttttttcataaaaccagattttcaatgtaaagcccctttctcgaactttatgtattttaatacataatatattatttttattcttattgtaaggggtttttttatattttatgaataaaaataaattaatcttctgggaagatatgttcaatatcaggagtaagagatacttctgataatacgatatgagaaacggtcgttgcatatgaagaaacatcattgataaattcttccagttcaacgagtgaaggaacagaaatttttacaatgtagcataagcttcctgttactcggtaacaaaaacttgcagatggataagattgaataaactgttgcatacgtgttgtatcaccattttttaaagtgatttctaaaatacaatctaaaacgagtcctgcttttttataatcaatatcgattgtgtatttttgaataacaccttcgctttcgagcttacgaacacgttctgaagtagatggagcagataagtttactcgtttcgccaattcacgcatcgaaaggcgactatcattatataattcatttaaaatttttcgatcaacacggtctaattgcatttgtaaatatacctccagtaaaataatgatttttgtaaagggaaaatataaattaagattcatatgaaatgtaaagtgaacgttatttattttacaataaaacagaaggaaataggaggggaaatgatggagagaatttcattatcaaatgtaggagatacaaagtttcaaaagttattagggcataattcggatatattacattcgtggagtacgttagaagatacactgtacaataaaggaactctttcagcagagttgaaggagcaagtgagaagaacattagcgtatgggaatgaatgtccgtactgtatggcaaaaggaagacctgatgatatgcaaaaggcagaggagattggtgtagccgttacttttgcgcatacatttgttcatgaccgaaaagcaatagatgatactatgtttcacgtattaaaacaatattggacagaaaaagaaattgtagagctttgcgcctatgtttgctttattactgcgtcacaacaacttggttttctatttcaattacagccaaattaagggggaaatgatgacaaatcaaatagcacttatcataatcgatgtacaaaaggcatttcaattaccagattggggcgagagaaataatatttttgctgaagaaaacatgagaattttgttagaagaatggagaaaaaggaaacgaccagtttttcatattcagcatgtaaataaagaaaatgctcagtcaatgttttatgagagagcggaaacggtaaactttaaagaagaagtgcaaccactacttggtgaagtggttattcagaaattcgttaacagcgcgttcattgggacaaatttagaagagcaattaagaaagaacaaatgtaatgcagtagtggttgtaggattaacgacaaatcattgcgtggaaactacaacacgaatggcagggaatttaggatttacaacatatttagtgagtgatgcaacggctacttttaaccgtaaaggtttagatggtaaggagtatagtgcagaagatattcacaatatgacacttgtaaatttacatgaagagtttgctacgattgtgacgacaaaagaagtattaaaattattttaagaaaataattgcaaattatgtagaaaaaaataagaatatttcgtataatctaagtacaatcattttgaaaataggggtggcatcatatggagcaaatttcagtaaagaaattagaagaggtacttgttgtagcaggggatgataaacagaagcaaaaggaattttatgaattgctcttatttactgagttttatgttgctggttcactagaagcagaggacggggcaacagagggaatacttcgtttgcgtcatttccaaggagaaggtagatggatcgttccgttctttacacaaatggaatttgtaaaagatgtgttgccagaaggaacgccccttattacgatacgtgggaaagagttatttggtagcattgagaaagatgctacagctgtattaaatgttggtactgatataagtaaaacatttattccagaagaaattgcagatatctcatctggacgaatttttaattattataagtaaaaggaaaagcgtaatcgcttttcctttttaatttgaatatggagtggctataccggaagaaatagagactgttttattattcgtgtttattgtcgctgtagctccaagtggaataccgatgtttggacttatatgtccaattggtaaaccgaataggaccggtatatgatatggtgcgaaatattcatataatattgcttgcaatgattgagatggctttgaaggagtgcagtcgtgacaacttgtgaaaataacgcccctacattcattaaactttccagataaaagtagctgatttaacatacggtcaatgcggtacggttcttcaccaatgtcttcaagtaataaaagtgtattgtccgtatttatctcgtagggcgagccaattatacttgttaacacagctaaatttcctccaactaacgtacctgtaactgtactgtgagagctagatacgatacattctgatgcagataaaatggttgaatacggatggaatagctgattgaaagaggataaagatagggaatcaataccttttcctagttcttcaatcatcggaccatgaaatgttataagctttgcataacgtgaaacagcagtatgtaaagctgtaatatcgctatatccccaaaagattttagggttttgccgaatgatttcatattgaatgtgagggaggagacgagcacttccgtaaccacctcgtgcacagaaaacggccttcacttcattatttgtaaatgcttcatgtatatcgtcaagccgaacttgatcacttccggctaaaaatccatatttctcgtaaacgctcttcccgattattacggataaccccatctcttgtaatacattcacaccttgtaatacattttcgattgtaggtggaccagatggtgcaatgatcattactgtatcaccttgttttaatgcatttggataaatcattaagctcagcctccttctctttcaatatattcgcttcatatgaagttcaacccttgcaaaagcaggggaaagcttatcaaataaagaagatataaaggaaataggaggggaaatgatgtttacaagtcgagtaacagacatattaaaaattgagtatcccgttgttcaagccggtatggcaggcgcgattacgacgccagaacttgttgcagcagtaagtaatagcggaggattagggacgcttggagcgggctatatgagcccagaacaaattcgtgaagcgatttatagaataagagaactaacagataagcctttcagtgttaatttacttgtaacgaaagagatacaaatagaagaagagaaggtaaatgaggcgaaagtattactaagtggagtaaatagagaattaggtatagaagtagaagggacgttaaaacttccaaaaagctataaggaacaattacaagtgttattagatgaaaaagtaccggtcgttagttttgcatttcaaacgttagaaaaagaagaaataaatgatttaaaaagaagtggaataaaagttatcggaacagctacccatgtgaaggaagcgaaagtacttgccgagttaggagtagatattattgtcgggcaaggaagcgaagccggagggcatagaggaacgtttattgggaaagaacgagatgctatgatcggtacttttgcgttaatacctcagttagtaggggctattccgcatatcccaattgtcgcagcaggtggtgtaatgaacggacaagggcttgttgcggcattggcactaggagcagaaggtgttcaaatgggatcggcctttttaacaagtgaagagagtattacgcacgatgtgtataaagaagcggttttacatagtacagatacgagcacaactgtaactcgtgcgttttctgggaaatatgcgcggggtattcggaatgaatttatagagagacatgaaggaaaagaagaagggctgccgatgtatccagtgcaaaacgtattaacttctaaaatacgccaagaggcagcgaagcaaaataaggaagaatatatgtcactttgggcaggacaggcagcatcattagctagaatcgaatcagctcagcatgtagtggagcgagttatgaaagaagcagagaatgcaatcgaacaattacaaaatatatacaaaaagaccacttgagtaattcaagcggtcttttcattagtttgctttataaaattgttggatggcttcgtcgatgtaaacccagcctttccaacctaagtgcatatgatcttttaagaagtatttatcgtattcatgatttgagaagtcggcaattggataaccagctttttcaatttgctcatgaactttcttatagtatgcttcgcggcgttctttcgggaagccagcgtagtcgtaccaaggacctttgacaggaacagaaatgaagagtggttttgcaccagattgttttaataaatcaagtacaatttgtaaatcttcatattctggcgattgatcataagcatcattttttaagtagccttcacgttgctttaatttcttcttgattttgctattgaagtaaccatcttcgataccatattcattagatccagattctgctgcacctgtttgatctgcatgtttacgagcttcatcccagttcatttgttttaatgaagggtcaagcttttctttatgcggtttaatattaaacatagctgtaaataaatctttacgatctaaaatgttacggtaaatataagcgaaaggtttagcagcaagtgcttttactttatacttcgtatcatcataagcgatgccttcaagcgagatttttaataaagtttctttttttacaatctcaaagtttaataaacgctttgcaatttgttttttcatttcaggttttaaatcattgttgaaaatgaagtggtaaccttgttgttttgaaaagttaggtgcaaagtgcgtttcatcaataccttgtggtacaaaccattgcggagaaagaacgaataccattttcttatctttcaattgatccattgtagatgcgaagtttaacacatgtacaaggtcttgtgttccgccgcgtccaagaaggaatggcgtaaatccttcaggctttactttaaaataattagatggatggaaagcatccatacgtgcgaattccgatgaaccgtacatcggaagatattttggatctgctaacatcttttgctgtaaaatcatactttgaattttttcttcttttaaagaagtagcagcttgttctactttttcatcacttaaaagtggaagtaggaagcgcgttggaataagtaagaatacagcaaaaagggccaatgctaaaagcatcggaccaaattttgctttgttcatcggatttcttccaactttttaataaccatgtttggtgtagcccactcgtcacggtcaaaatcagaaatagaaacttcaatatctaaacgctcttggaattcaactaataaagatactacagcaaaagaatcaagaataccttcttcaaataattgaacatctaagttttctttcacaatatcgttttcacatacttcttctaaaatatctaatacttgctctttgaattctgccatttttaaaatctcctttatatccgaaatatattatatgtgcaacttcttaatggaataagaagggtgcattaaaagtatctgttaaggtgtccagagaagattaggaaaccgaaacatacaatgtggaacgtaattacaatcgcaaggatgcgtgtgaatttattgtttggccaaaatttatgcttcttgttttttcgttcgaaaatatcgaataaaataaacagtgcggcatgatatagaccataaataatatactgcgcaacagcgcttccttggatatgccaaattcccataatgaagaagtttaaaaatgcaccgatatacgaaattgtgtaacggttcttaattaactttttcttcgttgcaaaaaatacgaaacgcatgtagatgaagtcacggaaccagaatgataaactcatgtgccagcggttccagaagtctttaatattacgactaaggaatggcttattaaagttttctggcgttttaattcccatcatataacttacaccaattacaaaagagctataaccagcaaaatcaaagaatagatataagctatagctatacatgtaaatcatatttgaaaagattgtatcgtgttgagcgaatgctggatccatacaatattgctttattaagtaagcaataataaatttatacaagaaaccttggaaaatacgatttagtcctgtatatagtaaattttgatattcttcagcgctaggtggcttttgaatatctttttggaatctacggtaacgatcgataggtcctgttgaaatcgcagggaaaaataaaacgaattcccagaagttaaagaaagaaagctctttaattaaaccatcacgaacttcaaataccatttgaactgctctgaatgttacgtaagatatacctagaaaaacaacaagttttaactcaggtagtaacgatgcaaatggtgcgatttttgccaaaataagaggcaaaatcgataaaataacagctatgcaaaatgtgaatgtactattatttttttttcttaaaattaaatagcctttaattagggcatattgccaaataataaatgcggctaacatcattgcttgctttggtttatctgagaagataatagcaagcatgattaatgttaaaacggcattatatttacgcaacattttaccttttaatccagctatgatagtaggtattaataaaatgcccactatagcgaaaaaataaaatgatccatatgcggtcatgctgtaacctcactcaataattttttgcgatctacctttccatttggtgtcattggaatagaagattgatacatgaatttacgtggaatcatgtagtttggtaatcgctcattgagttcttttttgattgcagatgttaatttgaattctttttcaaacgaatgctccccaggaacaacaaccgctaataaataatcgtatttctcaccttttttaattggaacgataactgctccttctacgtaagaacacgcacgaaggtgatgctcaatttcttctaattccattcgataaccatgcaacttaatttggaaatcaagacgaccattatagaatagaagaccattttcaacatagccagcatcgcctgttttataggcgcgctcaccgtcaatcatagtaaatgctttttctgttaattcagggcttcctaaatatccaacgcttacgcttggaccgacaattacgatttcacctttttcaccatcaggtgcaatcgtgccatcttctttcataataagaaggcgacagtctgatttacaatagccaactggaagtgatttgtattgattaagcacttcttctgtaacgtgaatacctgttacagcgacagtagcttctgttggaccgtaagtattcataattgttgcttttgggaaacgctcaattaattttctagccacttcatttggtaacacttcaccgcagaataagaatgttttcatgttcggtagcatactttcagagaaggatgcttccattaaacacatttcagcgaaagaaggtgtcgaagtccatacttgaatatccgattgctctaaagaagcaaacaagtcttttggacgcgcaatcatatctttatcgattgcccaaagtgtaccacctgttactaatgatgggtaaatatccattacagataaatcgaatgagaaaggtgcttgatttaagaatacttgccctgtttgtaagttgaaatcttctacagcccattttgtaaagctaacaaggcagttataagtaatctgaacccctttcggattacctgtgcttcctgatgtgtaaataatgtagaagttctcatcaccttttaccgcatgttcaggatttggagtgttccctttatgagtaaagaaaatatcttttaagttgtcttcacttacgatgcgaactggtaaatcagttacagttactgctgttgccgataaaagtaatttcgcaccagaattttcagcaatacgttgtacacgatcagctgggatagataaatctacaggaatgtaagcatgtccagcttttacacatcctaaaaagttaacaatcatttcaggttgcatatggccatacaccataattggtgaacgatcgtctggatactcagaagaaatccaatgtgctaacgcatcagaatcttcctttaattgtttgtacgtaattttcgcatctcgccaaacaaaagcggtttgatcaggcgtttctgcagcccacttttcaatttgttctaataacttcataacgttcccaccctagaattcattgtaaataaatgtacttgtgtttgtatcatggaatccatacaaccaaagtaatgcaaataaaattgcaagataataaaccgtctttgcaacccattgtgtgagtggtcgagaccatatctcttttaatctttccatgtctttccctctcttaatgaaataatagctctttgtaggtatcatgtcctacattattgtgaaaaaaacaaaatcccacattttaggtaaaaataagtcaaaaggctcttttttgatattagcactaaatactaaaaaagaaaatccctaacttagcaattatattacattcagcatgaatttgtaatgggtttgacatgtaaatagaaagtggattgtgtgaatacataaaagtggactataagaatacgtaaaaatacagtatttgtttttattaatcattcaagacggagtaaacttttaaatttctagttcttttgaaaaggaggaaattatcatgaatagagtgtggaagaatctaatttcggaagaaaatatcgtgaaatggagaaggcacttccataagtatccggaattatcatttcatgaaaaagaaacttcgcaatttatatatgatacattatgctcattttcttcttttgaagtaacgagaccgacgaagtatagtgtactagcaattaaaagaggtgtgaagcaagggaaagtaattgcgattcgagctgatatagatgctttgccaattcaagaggagacaagtaaatcttatacatctgtgaataaaggaatgatgcatgcatgtgggcacgatgctcacacagctattttattaagcacagcagaggtgctatcaaatataaaggaagattttgcaggtgagattcgtctattctttcagcacgcagaagaggtgtatcccggtgggggacaagaaatggttgaggcaggtgtaatggacggtgttgattatgtaataggtttacatgttatgtctggattagaaagcggaaagataggaattgtgtatgggccgatgatggcggcaccagacgtatttacagttgaaattcaaggcaaaggaggacatgcggcgcgaccagaagaaacgatagaccctattgctatcggagcacagattattacaaatttacaacatatcgtatcaagaaatacgagtgcttttatgcaaagggttatttcagttacacaatttcatgggggaacggctgacaatattattcctagtacagcaactttaatgggaaccgttcgttcatttaatcaagcattgagggtggaagcagaagggaaaatcgagaaaattgtgaaaggaattacagaagcacatggaggatcgtatacatatacgtatcgatatggatatgatccggttattaatgatgaatatattacgaaaatagtagaagaaagtgcactacatttgtttgggaatgagcgtgttgtgaagcttgaaccttctatgggtggggaagatttttcagcatatttaagaaaagcacccggttgtttcattaaattaggaacaggtaatgaaaatatatatacttgttatccacatcatcatccgaaatttgacgtggatgaatcagcattaatttgtggagtggagctatttttagagacgactataagattactaaaatcatagaaaaacaaaaaaaggcaactgcactctattgcagttgcttttatttctttccgtcagagagggctgagaaagaactatgctcattcatagtatatgaatagctaacggacaagcttgtacattttaatcatttttttaaaaatagttgttgacactgataatcaatgtcaattaatctaaaagtagttgaaattgataattattatcaataggatggatgcgacatgttaatgagaaaaaattttcaccttctgcggaggggattaaaagataaaaataaaaataaagatgttgatcagcatatggaatggcaaagaaatgtaattcggtctgaatatgtagatgagaagaagagcattcaaacagaaaaagagatacaaagtaaagggagaggttcagttgagtaagttagtaatgatttttgcaagtatgagtggaaatacagaggaaatggctgaccacattgccggcgtaattcgtgaaacagaaaatgaaattgaagttattgatattatggattcaccagaagcttctatattagaacagtatgatggaattattttaggtgcatatacttggggagatggtgatcttcctgatgatttcttagatttttatgatgcaatggattctattgatttaactgggaaaaaagcggcagtattcggatcgtgtgattcagcttatccgaaatacggagtggcagttgacattttaatagaaaagctacaagagcgcggggcagcagttgtgttagaaggactaaaagtagaattaacgccagaagatgaagatgtagaaaaatgtttacagtttggagctgaatttgtaaaacacctttcttaatggcagaagggagatgaagagcaagtgcatgagaaaatctcaatcaaaacgatgacagattatcatttgtatgattttatgcgttgtccgcataaattttattttcgtcatataaaaagaagagaaccttcttcatttgaatggcaacaaatagcacaaatgattgtcaatcaaattattaacgagtattacacgctacctgcgggtcaacaaacgaaaattgtacttttaatattaatagaaaagtattggaaaaaagtaaggattaatatgtttgcttcgaagacggagtactatattgtattagctaagctaacggatcacttattacagtttgttgaaaaggatgatagtcagacaccaccattgtttttatacgagaagtttcaaacatatatggaagagttaggtgtccacatgtcattgacatttgaagttggtgagtggagtgctgggtcgtttgtaattaaaaagtatgtcgtcgatgcggatgaggaaatgcttgctctttgtcagaagctaatgacagtatttagttataaagctttcggcgttcttccaggaaagattgaagttattaatttaatagaaggaactaagtatgagtacattccaaaacaggaagatattataactggaatggctgatttatctagaatgaaagaaatgttgcaacaacctgagcattatacagagcgtcattttcgttctgagtgtataagttgtgcatttcgtagtgaatgccaaggggaagaagtaaagaaagaagcggagcagaagaaaaatatcgtacattaaaggatgcaactttgcatccttttttgttgttgacatgaaaagcttttcatcatttaccgtatatttatagcagattttaataaagtgaatctttaatcagtgggggttttgtcaatcccccactgattatcagccctcattaatcgggctacccgcgaatagcaggataaagggaggaataatcaatgaaagatgaaacgaaagtatttcaatggttaaaagaacaaaatgctccttttgaaattcaactgcaaattttacaggcatttcaattgtataaagtcattgttgaaatggataaaaagttaatgttgtatgaggagagagtatatagggagagaatgtaatctcatccctgtaatatcgtttttagctgttctgtgcctgtaatgaattcgagtttattctctgactcaaagttataaataatattatgtagtaaaggactgtattgatagaagatagtaatgcgatgaatgagtaatggatcatgatgagaaataagtgtactgtactgttcatatacagatgtagtaaactcatgtccgaaatcataatatagtcctgcaaaatcaaaagcaggatcgccaatttgcgcatcaccaaaatcgataacacctgaaatacttttgttatgcttgttaaataaaatgtgatgatgagtaaaatcagtgtgaatgattgtgttttgaaaagtggatatagctaaacatgcaaagaaattttcaaataagcgatttaaggctagtttctgtaatgaagtaaggctagtagtgagatattggtttaattttgtttgtagctctttccagtaggtacatgttttttcaatagggaaacatagcgttgtaacttggtgtaaaggaatgctatgtagtaccgcaaggaaagtagctaattgtgtaataattgctttcagctctggatcctccagcgtggcaactgtgtctgtttttaatggttcaccatgaatgagagtatagtaactacaaagaggaacctcatcagattcatttttataaattaggtgatattgtggaacttcgatttcttgtagtgattgagtgagaattgcgcatagttctttttctaacggaattcgcatcgcatattcctgttttcgcgggaaacgaaacaatagctcatcatttactataactgctacattatcccatccttcttcattttgtttatatgaatgtatagaaagattaggcaaagcttcttttatataatgtttgtaagagtccataattgttcctcgtttctaagttaagttattccactttatgatatcagaattttctttctatatgttaaaatatagctatcattattaagaagggcgggagtattacgaaaaaaagactgttaatcagttctctatgtatcgcttttatattgttatggtcatataaagaggaggtttttgctacctttaaaccgattgatcagtacgagttaaataaggagttaaagaacaaaagtatagaaaatttaactcataatgaaatgaaaaaggtaggagagcattttgtgaccgagcaactatcagtgtttgggtctactaataaagaagatgtgaaacgaaaaggtgaagaactatttttaaatagagggtatgaacaattaatgggaaattattatccaaatcgttttcgagatttagagtataaatttacaaacgaggagatacgtgaagagaccgatgagagttttctttatcaagctgtagcgtacgttgcgggtactgaaaatggtaagagaagcgaaatgaaattgaattatgaagtgaaaattgtaaaggttaataatatatttatggtgctagaacaaaagcagcgcgtacaataaaggaaattcattgctcaatagaacattttggggtgtgtactacttaatgcggaataaaaaggccctcaaggaataaagggcctttaaagattttcattttgttgaccaagttctttttgagcaatatataaatttccttgctcgacttgtttaagggtatgaacagaatctcctgcatatcctttttgtgttttaacagttctttttgaacgattggaatcttgtttcttcatataataggccacctttcatcaaaaataaacgaaaatgataagtatgagtaatacagcagcgaaaatggtaatgcccattaaaaacgaagtgtttttatatttaggtggcttatgtacatcttgccgatatccaggtgaaatttcaggggcaaattcttcatcgaatgattgctttttttctttgtcgtccatatgtacccaccttcctttttcattatattatacgttacaagaaaaaatatgcataaagaaaacagccgctttattattagcggctgttttgtgttgtatattttcgttgtacttgaaagagacggataagtaggaaggcagcgccaaatgctagaccgataataagaccgatccaatagccttttgcggcccattctgtatacgttgctaatatataacctagtggtagacctattatccaataagcaattaaagtcataattagagcgacatttacatctttataaccacgcagagctccttgtacaggggttgcaattgcatctgaaatttgaaataaaatcgcaaagataagaaattcttttgctaaatgatgaacttttgcatctgtcgtataaatagaagcaatttgatcatcaaagaagtagagaagaatcgaatataataaagcaaaggtaagggctaatccaattccaatcagtccgtattgttttgcattatcgaaacgttttgcaccaacttcgaatccgaccgcaatagtcattgccattgctaaacttagcggagtcatatataacaaggaagcaaagttcatagctgcttggtgagctgcaatagttgtcgtactaaaattactcatcataagcgttaccgcagcgaaaatactcatttcaaaaaagatagcaaatcctatagggacgccaagctttaagaatgctgtccaactcgaaagagaagggcggtataattgtttgaaaatgttgaaagaggcaaaaggctctttcgtctgaataataatgactgtaataattaaaatgcaccaatatgttgcagtggaagcaattgccgctccaacaccaccaagttttgggaaaccgaagttaccaaagattaataagtaatttaatattacgttaattggtaatgatagtaatgtaataatcatcgttgttcgagtttttcctaatgcatcaataaatccacgtaaaaccgtgtaagtgaataaaggtataattcctattgcgataatacttaaaaattgagctgcaatacgttccacaggttcttctaagcgcatgccgtttaaaataggtgaaacgacgaagaaaccgatgaggataacaacgaaactagcacaaattgctaaataaactgcttgtatgacaacgtggggaacgtcctcttttttcttggatccaacgagctgtgcaacaatgggagtcgtggccattaaaattcctgttaacccagtactaactggaatccatatacttgttccaattgcgacacctgctaaatcagttgggcttgcatgtcctgacattgttgtatcgaaaaagctcatcgcaaataatgacatttgcgttacgaaaatcggaaaaaatagtaatacaaattgctttaacttttgtgagaatgaagtagtttctttcataaaatcccctttccgtataaaaaaacaaactcttactatcatacaatttaatcaaagattagaaaagaaatacgcgcctacaacatatgaagccaataaaaaaaggatgcactttgaaaagggataaggtattatgataaggtgtgaaaaaattacatattatttgttattaaggaggcactacttgtggctgattggttaattggtttaatcatgggtgctgttgaagggttaacagagtttctaccagtatcatcaacaggacatatgattttaacaggacatttaattggatttgaagacgagagagcaaaagtttttgaagttgtaatccaattgggatcgattttagcggttgtagttgtattttggaaacgattatggtcgttagttggaattgggaaagtaaaagaagggccatcgttaaatttattacatattattattgggatgattcctgccggggtactcggtgtattattccatagtgcaattaaaaaggttttatttggtccaggaccagttgtcattagtttagtagctggtggtattttaatgattgttgctgagaagttttcaaaaccaagtacagcaagaacgttagatgaaatcacatataagcaagcatttacaattggaatgttccaatgtttagcactttggccaggattttctcgttctggttctacaataagtggtggtttattagctcgcgtgtcgcatacagcggcagctgaatatacgttcattttagcagtaccgatgatggtagctgcaactggattagatttaattaaaagctggcatgtattaagctcggcagatgtaacgctatttgcaacaggatttgtaactgcattcgttgttgcgatgcttgcaattgtctcattcttaaaattattagctcgtgtaaaactaacaccgttcgcttattatcgtttcattttagctgcggtattctatttcttcattatgtaaaataaaaacctgccgagctcggcaggtttttattttactaatttttctatcatgttttccattacatgttcccaaagagaagtatcatcagctaatgtagcacggaaattagcatacatttctttttgtgtttcttcaaatgttggatcttctttttcaggtaatgtagcgcgcattgaagttactaattcttgtacttttggagcgcgtggtccaaagacggcttgttcatttccatctttatcaatgaaaataaagattggaatcgcacgtgctgttccatttgttaaatattgatccattaattctaagttttcatcgcgaattaataaacgcatatcaatatttgcaacttcagaaattcgtttcataacaggtacgcataaaagagcatcgccacaccaatcagcagttaatacgataacacgccagccatcattttgacgttcttctaatacaggaagtaattcatttggaattaaaaaattattgtaaatgtgtagtagctcgtattggtttacttgcatttcattcacatatgtatcaaaggacatacctttatcagcccattgttgtaagttcataattaacacctctttagtaagatttgctttcattgtaccaatttttatatagaaaagcttgtattcttactctttcttgtcacttaataattattattttatctttttggctgagatttgagaacctctcctcctcacgcattaaaatccccctttttctggaagttgacttcattttatcatgaaatacatattaaaaaactacgaattatgggaaaataagatgacaaaaagtaagatttcatgtaaaattattaataaggtttttatttaactaaatgaaataaaaggagctgtcaatgttgtctcaaaatcgagagcaattaatggaagaactatcgacaaatgtgtttgctatgtttcgcacattgcgtaatgatatcggaaaaatattcggtggttacataccgtggaatgaattcatcgttctgagaatattaaatcgtacgaataaagaaatggtatcgcgtgtagcaaatgaattaaatgtgtcgaatagtcatattacagctgttacagaaaaattaattaataaaggttttgtaactcgttcacgttctacatcagatcgccgagttgtgtatttagagattacagaacaagggaaagatttagttgcgaaaatggaagatgcgaaaaaacaatacttacaagaaagattctctgcactttcagaagatgaaatgaatgtaatgatttcaatttccaaaaaacttatttaagtgattataaataagaaaacgcttacgtgatgaaatagaaggtcttccttatatatgggaggtcttctttcgtgtgtaatagatgttaaaaaataaaatgtgtatgaaaaaagatagagcgccatactactaatacaaggaagggagggagaaatatgacgaatcgtaacggtagtaaagggagcggtaatcaaggatcaccaaagtccggccagtttaatcaggaatttagcactgaatttgaaactggtaatgataataaagggaaagaatatcgttctaaaaaagggagtaaatcaaaaaaggagtgaattaattcactccttttttgatttacgatgctgccgattgatccgtattatatttttcttctgattttgcgacaatcattgcgcaaattgcatcgccagaaatgtttacagctgttctagacatatctagaatacggtcaataccgataattaaagcgataccttctactggtagatttacttgatttaaaaccattgtaagcattacaagtccaacaccaggtacaccagcagtaccgatactagcgagtacagcagttaatacgaccatagctaattgcggtaatgtaagttcaactccgtatacttgagcgataaatacagtggctactccttgcataatggcagtaccatccatattaatagttgcccctagtggttgtacaaatgagcttatcgcttttggaacgccaagcttatcttgtgctgttttcattgcaaatggaagcgatgcattagagctagatgtactaaatccaattgccattactggcccgaaatgtttaaagaaacgaacaatactttcttttgctaatatctttaataagccaccatatacaaagaccccgtgaataatgagtactaacataacgacaatcatatacttgaacatcgcagcgacgcctgcaagccccattttaccaacggatgaagcgagcaaaccgaatgttccaattggggctaatttcataacgagattaacaagatacatcattaattcgttgccctgttcaagtaatgaatggataccttgaactcgttttcctaaaatagctataccgagtccaatcaatacggcaaaggcaatgatttgtaacatgtttccgtcagccatcgcttttgctgggttatctggtacgatatttagcaatgtgtcaacgaaagatgtttcagtttttgcaccttcatacttaagaccttctgttttaaaattaccgccagctcctggttttataataagtgcaaatgtaaccgctatagagatggcaaccgcagttgttacgagaaagaatgaaattgattttaaaccgattcttccaagttgtttcggatctccaaggccggcagcaccaagtacgatagaaataaacacaacaggaacaactagcattttaataagtcgaataaataattgaccaattgggttgaacacatattgatttagtggctcaaagatagatggagcagctaaatttagagtgagtccaacaactagacctagaaataatgcgattaagattgcttttgtttgtttcaataaaatcccccttttgtttttgcgaaatttctttctaaagcaattataccgaaaaaatccctaatttaacaatattttctgaatttttggtttttaggtgtagatagactgattttgtgtttggaaaataaaatagaccatcacataggatggtctagggaaggggacaatttatgtcaatttaattagggatggaagttgctttaagacactggggaatgtcttataaattagggaggaacaacttcaatacacccgaaatgggcagtagctaccctcttgctaatcgcaggaggatgctacacatcaagctgagatggtaacagcgggacaaattatggcaacaaaattagtatcaaacgagtttgttgcgatgcttgatcttggaaaagtagctggtgatttatcggctcgtacagttggtatcctttctgtattccttgtatcatttgcgaacttctcatctatcggaattatcgcaggtgcaacgaaaggtatcgatgaaaatcaatcaaatgttgtatcatcatttggtctacgccttgtgtacggtgcgacattagtaagtattctatcagcgattatcgttggtgttatgttataaaaaaagatggtcctagctcatagctagggctatttttatggtaaatttgcatgaaaaaaccaattaattaggaatatattaacatataaaaatcttttaaaatttatattgcatttcgtctagataacgcttacaatttgatttgtaggtggtatcaatttcagactttcaattatggtaggagagaagaagctaccttttataaattgcaatttatgtaaacgcttactgattttagatgacagttgaatagttttaggggttttaaattttttaacaacaatggtcagacgtcattcgttatacgttatacgaccaataactcgtgggagaagtggaggattcacatatgaagttcgtaatgtttctagtcggtttacttgtagtgtttgtactaggtttccttatcagttcagatcgtaagaaaattaaatataaaccaattgcacttatgcttgtcattcaattggtacttgcgtatttcttactaaatacaaaggtcggattcgtattagtaaaagggatcgcagatggatttggcgctattttaaaatttgcggaagctggggttaatttcgtatttggtggtctagcaaacgatggacaagcaccattcttcttaacagtattattaccgattattttcttagcagtattaatcgggattctgcaacatattaaagttttaccgattatcattcgtgcagtcggtttcctattaagtaaagttaacggtttaggaaaactagaatcatataatgcggtagcagctgcaatcgttggtcaaggggaagtattcattacagtaaaagatcaactaagcaaattaccgaaaaatcgtttatacacactttgtgcatcttcaatgtctacagtatcgatgtcaatcgtcggttcttatatgaaaatgattgatccaaaatatgtagtaacagcactagtattaaacttattcagtggattcattatcgttcatatcattaatccatatgaagtaaaagaagaagacgatattttagaattacaagaagacaagaaacaaacattctttgaaatgttaggcgaatatattatgcttggtttctcaatcgctgtaacagtagcggcgatgttaatcggtttcgtagcattaattacagcaattaacggtgtattcgattcaattttcggaatcacattccaaagcattttaggatatatcttctcaccattagcattcgtaatgggtattccaacatcagagatgctacaagcaggacaaattatggcaacaaaattagtaacgaacgaattcgttgcaatgcttgaccttggtaaagtagctggtgatttatcagctcgtacagtaggtattttatctatcttccttgtatcatttgcgaacttctcatctattggaattatcgcaggtgcaacgaagagtatcgatggcaaacaagcaaacgttgtatcatcattcggtttaaaacttgtatacggtgcaacgttagtaagtatattatcagcgattatcgttggggttatgctttaataaattaagaaaagcaatgagcgtaggctcattgctttttttgtttaacttgctttatccaagtttcttttaaaacgtggtttctctaaataagttcccagtctccacacatattccactggccccattcggtatttctggagccaataggtgctaacgaataattgaatcgtataaattccgatggttaaaagaataccgaagaaatagccgattttcccgtataagccaaatccatatgcgtaaaaaatagttgttgcgataatagattgcgctaagtaattactaacggacattttccccatgttcgccatgtatgttagtagacgggttgcttttttgtaatggaataataaaatgattgtgcttccgtaaaagaaggtcatagttactggtgtaaggccatcttgtaacataattaaaagcgggtgctttacgaacatagctaagattttaattgtaaaagagaagagaccggtggcaaaccatatttttttgacaccaggtatatgtttattgacctcaaatagccagccttttttccctacatacattccgagtaggaacagtggagacataaaaattattgcgaaaactgatatgaaaaataatccgaatgcaccgtcaattcccatgtaatcaaaaggattttcagtcaatctaaagttgacgtgatccatatagcttccagtttgatggactttatgttctttttcagtataaggtgcaaaatcatttatatttgtagatggatcagtttgataagacataagtgtaataagtgcgagtagaataatcgcccaaatgagcaaagttttcggttttcgattgatgaacatcattaagaaaatcccaattattccgtatgcaaataaaatatctccctcccaaacaaaagtgccgtgaatgtagccgagtagtaaaagaatgataatacgtcttatgtatgtggggaagaatttttttccttttgcgataatacttttttgtaacaaaataatgctaagtccaaatagaaaagaaaatagggatataaagttatgtgtgccgaagaattgaataaaccaattagcgcctttatcaagatcgccgaatagataagttggtttttcactggtgaagaacccgaattgaattaatgtcatattgactagtaaaatgccaaacaaagcgaaaccacgaattgcatcaacagcttctacacgttgattcatttttcctctcctcgtatattcgtttttatattgaaaataataccattttatagctggcactatgtcaaatatgaggaaatttaaggtgattttaagatagagagcaaacaaaaaaatcaccttaattcatgtattaaggtgattgaaatattattcagctggaggcgtaaatgtacgtttctctaattcagcatctagcataaacagtgcgtttgaatcgcttgtaatacgttttaatttttgaatgatgctatcgaatgaagcttcttcttcaacttgttcgtcaacgaaccattttaagaatgtaattgttgcatgttcacgctcgtcccaagcgatatcagataagttgtaaatacgtttcgttacttcacgctcgtgctcaagtgcgacttcaaaagcgtttaatacagatttgtattcgttattcggattatcaaatccagtaataatagcgcgttctccgcggtcattaatatagttgtaaagcttcattgcgtggaaacgttcttcttcagcttgtacaaggaaaaagttagcgaatccatcatagctctcagctgtacagtaagcagccattgccatataagcatgggcagagtaaaattcaaagttcatttgttcatttaatgcgtcgtgcaatttttttgataacataaaatcccccttagtattgtgacaataatattataccataattgataatattctcatttagatacttcgaaccttttcgaaagctttgtgacgtgtgcatccataatgtcttgtaagtctaaatcatatttttgcgaaagaataataaggttagatagtacatcgccaagttcttcttttagttcttgttttagctcttcttctgttttcgcatcttcatcagggcgatcgcggccaatttcaatagcacgaacgactcgtgaaacttccccaacttcctcggttaagaaatttaagcgaataaaggcattatactgtgaccagcttcgtttttcgtaaaattcctcaacccatctttgaaatgcaacgatatccatttcttcctcatctcctcaatatgttgtacaatgttcattgtatcataacaatatatagtttcggggtgtagggatgagaaagatttgtgtgtttgcaggttctaatttaggagagagaccagaatttaaagagcaggcaattcagttaggtaaaatgtttgttgagaacgactatgagctcgtatacggtggttcatgtgtcggattaatgggagaagtagcaaacgaagttcttcgtttaggtggacgtgtaacaggtgttatgccgcgcggtctattccgaggagaaattgtgcatacaggattaacagaattaattgaagtagagacgatgcacgaacgtaaagctaaaatggcagagcttgcagatgcttttattgcgcttccaggcggatacggaacgtttgaagaactatttgaagttgtatgttggtcacaaattggtatacataataagccggttggtttattaaacataaaaggtttttacggaccaattttgcaaatggttgaacgtgcagcagaagaaggatttatgaatccatcaaataaagaattgatcgtttcagcagagacagcagataaactgattcatgcaatccaaaattatgagcgtcctgttttgggaacgaagtggaagcaactatcatagcaaatacggaaacacatgtcgttttaatttaagatggcatgtgtttttaatttggttaaatatgttaatttttagatgtaatgtttttggaaaaggagaaagagatggaggagtttgtgtatttaagaccggtctttaaaagtattttagcagcatctattcttgttatgctaattgttttgagacagaagaaagagttgattaatgaattttcgctttggtttatctcggtattgtgtatcggtgtttccgcgataacgttgtttatgtctgggtttatcgttgatgagtataatctaggtggagatccacaatcgttttgtatgtttattgcgattggttgtattagtggtctgaatttcattatttattacagaaggcaataaaaagaggcattccgtattactttggaatgcctttattattttgattgctttgctttttatacaggtaccagccaccccagccgccaccaattgctacgacaacgaggaaagcatagtccttaacctcgacacgtatattgaaaatattagctataagtaagagaatcccaactgttattaacgcaaaaaatgctctaattaagtagtctttcaactgaaccactcccgtcatttaagtagtaaatgatgaatttggaaaagctaaagggtgtttcctatattttaacatagatgagattgtaatatattgataaaagtaggggagagaggcgtgttaatattgtcgtgatttgtcgataagtcgatataattgaaaaatcgctgatatattggatggaatcgccgatataattggataatcgctgatatattggggagaatcgccgatatgttggaaaaatcgctgatataaatttcatgtaccagcatgcgcgatcaatctatagaaaaaagcgactctgaacgagccgcttccgctttaaagtaatattcagctccggtagctagaatgttcggtggcttcgctttttcctgcgaggcaaagagcgcctctacgtcaaaagctccatctccctcacattctgagcaagctacctccgcttttaggtgatatccagctccagcggctagaatctccggtcatttcactctctcgctcgaagcaaaaagcgcttcaaggtcgagagctccaatgccctgcgattttgagcaagccgcttccgcttttaaatctattattgattcaagaacgcacgtagcatccaagcgtgtttttctagttctgtgtagatgcctagtagtaggtcagatgtcatttcatcgtcagagtcttgagcgatttccatgccttttttcagttcgactagcatcatttcgtagtctttcatgattgcttcgaccatcccttctgcagtttctccgtatgctgcttcttgaatagaagatagttctaagtattctttcattgttgctactggtttgccgccaattgctaaaatacgttctgcaatttcatcgatgtgagtagctgattctgtgtaaagttcttcgaatttctcgtgtaatgtgaagaattgaggtccttttacgtaccaatggaagttgtgaagttttgtgaataaaacgctccagtctgctacttgtttgtttaatacttcgattacttgtttgttcattatgatcaatctccttttgagttgttatgtgatatcaattactaatttataataattataatctagtaatctctataaatcaacccttttgctggaattaatttgaacaaattatgaactgttgtaaataaaaggccctattacggtgaagtaatagggcctttgtttgagatatggctcttgttctgaacgagccgcttgtgcttttaatgatatccagctccggtgactagaatctccggtcatttcgcgccttcctgtgaggcaaagaacgcctcttcgtcaggagctccaatgccctcctgttctgagcaagtcacctccgcttttaattgatatccagctccggtgactagaccagtcggtcatttcgcgccttcctgtgaggcaaagaacgcctcttcgtcaggagctccaatgccctcctgttctgagcaagtcacctccgcttttaattgatatccagctccggtgactagaccagtcggtcatttcgcgccttcctgtgaggcaaagaacgcctcttcgtcaggagctccaatgccctcctgttctgagcaagtcacctccgcttttaattgatatccagctccggtgactagaccagtcggtcatttcgcgccttcctgtgaggcaaagaacgcctcttcgtcaggagctccaatgccctcctgttctgagcaagtcacctccgcttttaattgatatccagctccagcggctagaatctccggtcatttcgctctctcgctcgaagcaaaaagcgcttcaaggtcgagagcttgaagtgtcctgcgattctgaacgagccgcttccgcttttatttgttaaacagccttttgtttttcttctacatcttgcccatcccagcactctgtattctttaagccagggatagagtttgcaacgaagacaggatcttttccttgtttcttttgcttcaaatagtctactaatgcagcgtaagcaaatttgctaaggaatgagatggcaattaagtttgtgaataccattagtcccatgaataaatcagctaaactccaaactgttttaagagcagcgattgatccgaagaataccattccgacaactgcaacacgataaatcattaaccatgttttactttctttaatgaatgcgatatttgtttcaccataatagtagtttcctagaagtgaactgaaagcgaataggaaaataataatcgctaagaaagtgcttgcccacggtccaatttgtgaacttaatgcgttttgtgttaattcgataccttctaaatttgatcctttgtaaagtccagaacataatacgataaatgctgttgatgtacatactaagaatgtatctacgaaaacgcctaacgcttgaacaagcccttgttttacagggtgagatacatcagatgttgcggctgcattaggagaactacccattcccgcttctgtagcgaataaaccgcgctgaattccgaacttgattgctgctccaataccaccagcgatggcttggtctaaaccgaatgcaccgttaaagatttccatgaaaatgcttggtaacatactgaagttgttaataacgacaaaaatagccacgccgatataaacgattgccattggcggaacaatcatttctgtaatacgtgaaatgctcttaatgccaccaaaaataataactgcaactaataaggctaatagagctcctacgattgttcgctctagtccaaaagcattttcaaacgctattgttactgtatttgcttgcactgaattgaaaattaatccatacgcaactgtaataagaagtgaaaaccagacgcccatccagcgtttgtttaaccctttttccatgtaatatgctggtccaccacggaacctacttccatcttttactttataaatttgcgcaagtgtacattctacaaaactagtagctgctccgataattgcgataaaccacatccaaaatattgcgccaggtccacccattgaaattgctaatgctacaccagctaagtttccgataccgatacgtgctgctgcacttaagcaaaatgcttggaatggtgagatgctatctttctttttttcttttcgattaaaccctttactaattaagctgaccatctcactgaaatgagtaatttggacaaattttaatttaaaagagaagtaaagaccgaagccgattagcattgcaataagaatatatgaccataaaatattattcgttacctcaaggaatctgctaaagatatcaaccatataatacacttcctttttttcgtaataagaaaattatatgcaaaaaatatacgagaatcaatttttctaaaaaattatgttacttaaaacatttttgtgttatgattatgttacatcgtaatatttttagaattatttacattttaaaaaactaaatttaaagcgagaaagtggggataatttgaaagaagattctttatggaaagtaagccttgagagtttgaaaatgagaagtaatatattttttatcattacatctttaagtatctttttagggtccacttattattacaataaaagatttccaaatcacaaatatcctgagtggttagaatttctaaagttgattggatgaataaaagacagaaaaacagaaaattaaaataaacaagttatggaggagctaaaaatgaatattagagaaagtgaacttccgggtattggttataagtttcaaatcgttacgaaaggtaatgaaaagatggtaattgtcattcatgatgatggtcgtagagaaatgtatcattttgattcagaccatgaagaaagcatctcaagtatttcactacgtgactcagaggcaagacaaatcgctgcaatattaggtggaatggtatataagcctagggcgttagaaaatgttgagatggtttttgaaggtttagcgattgagtggttcaaagtggagaatacagctccagcaatcggaaaaacaattggcgatcttgaaataagaaaaacatatagcgtaacaataatcgcggttatgaagaagaacatgaagaagctatttaatccaggaccagaaacagtaattgaagaaggagatatgcttgtagtttcaggtgagagagaagaaattaaaaaaatcattaatgaattactttcaaataggggggactgattagatggatacgttaatttttgaagttggtacagctttagttttagtggcaattgcagcagtaattgctgggaaatttaaattctcagtaattccttttctaatcgttcttggaatgttagtaggaccgcatgcaccgacaataggtgttatcgatctcaaatttattgaaagtgcaagtgtaatttccttccttggacgaattggggttctattccttctattctatctaggattagaattttcaatgaaaaaactaattaaatctggacgctctattgcgattggcggaacgatttatattttaattaacttttcacttggtttgttatacggatttataatgggattcccattactagaaatcttaattattgcgggtattattacgatttcttctagcgctatcgttgctaaagtgttagtggacttaagaagaactggtaataatgaaaccgaattaattttaggaattattatgtttgaagatatattccttgctgtatatttatcagttgtttctggtttagtacttggagatcacgcttccttcttaggtgcccttacttcaattggaattgctttaggatatatgcttctattctttatagtagctagaaaggctacgccgttattaaataaattgctcaatattagctcagatgaaatctttattattgtagtatttgcttcgttattcttcattgctggtttttcagaaacaattcacgttgcagaagcaattggagcacttcttctaggattagttttctctgagacagagcatagtgaccgaattgaacatcttgttgttccatttagagactttttcggagctattttcttcttcagcttcgggttaagtattgatccgttctcattaggcggagcgatatggttaacgttaggtgctgtccttcttacgataatcggtaactttgtagcaggaatgattgcaggaagacaagctggattatctcataaagcatcaacaaatatcggattaacaatcgtttccagaggagagttctccatcattatggctaatatcggtatcgccggtggtttaatgtcagtactgaaaccattctcagcactatacgtgcttatactatccattttaggcccacttctgacaaaagagtcgaagaatgtatataaattcttaaataaaatctttaagtgggatacgaagactaactaaattaaaaaaataaaagtacaagatatttcctgcttgtacttttattttggtgatgaaaacagtaaagagaggtacatgatgttaggagagttgattcattcggttttagtttttttagaaggacttggttattggggaattatgcttggattaatgctagaggttattccaagtgaaatcgtattgtcttatgcaggctatttagtatcaacaggaagcattacattttggggcgctgtcgcgttcggtacaattggtggtgtaattgcacaactattcatttattggattggtcgatatggaggaagacctgttcttgagcgatatggaaaatatattttaattcagaagaaacatattgattatgctgaagattggtttaatcgttatggaactggcgttatctttaccgcacgttttattccggttgtgcgtcatgctatttcgataccagcgggtattgcgaaaatgtcacatgctaagtttattacgctaactacattagctgttattccgtggtcaattgtgtttgtatatttaggttttaaattaggaacagagtgggaaagtattaataaagttgcggggccatatgtgaaatactttgcacttgttgctattgttagtgcaattggttattttgtattaaaaaaaatgatgaaaaaaaagtgattacagaaaaggaatctatgtcgacgtagattccttttttattggcattttttcaaggatgaaagaatacgtttaatatttactatattgtggcatacatatagaaaaagggtgcttggaaaggggaataaagagaaatggaactccagtttcaaaatgtatatcaacaggtagagaattggtatgtgttggattcggagcttccttgggatgtcaaaaagttgagagaggatttgttttctcttattgaagtatgtaaaacgcccgttattttttgtgatacgtgtgatgcaaatgatgtgcttctatcattaggggaagaggaagaagagttcctattcccagtaggtggtttttatcataaagaaaagcaattaattttcgtttgtatgtgggaagagtatgatcaagttctcaaaacgctactgcatgaattccgccatgcgatgcagcataagagagatatattgtatgtgggaagtgaacggtacgaagagcggtggattgaaaaagatgcgaggaagttcgcggagaggaaattggatgaatataagagtagaaagttaatgtaaagcatagtggagaaatagcgctgtgctttttatgcttattaaaaataagtatttgacttttattaagtttagttctaaactaatgatatgaaacgagcgaggtgatgaaatgaaaacagaagatagactagggctactattatggtttcgtttgtcacgcttttataataagagtattcgtgagacgaatcagcatttgaaaaaatggaatatatctgccgcccagtttgatgtgttagctcaagttggaggatataatcgtttaacgcagcaagaacttggaaataagctatttgttacgaaaggaaatgtaacgcagcttttaaataaaatggagcagcttgagtggattttgcgtgaacaagagggtactacgaaatatatttctttaacagaaaagggaagagctttatatgaggaaatcgtcccacctcaagaaacgttccaagcagagaagtttcataatttaaatatagaggaacaaaagcagttattaacactattaaaaaagttacagtaagaaaaaattttaaaataaatctcgaattcgagatagtatgaggtgaaggatatgtttagaaaagttgatcataaaaatatgggcagagcaaatcatggttggttaaatacacattttcatttttcttttgccaattactacaatccaaataacatgaacttcggagcgttacgtgttattaatgatgatctagtagcggcgcaaactggttttgatatgcatccacatcgtgatatggagattatttcttacgttgtagatggtgctttaacacatgaagacagcatgggaaatcgcggaacgattgagcgtggacatgttcaatatatgagtgctggcacgggtgtatttcatagcgagcataatttaggcgatgaaacgctgcgtttattacaaatttggattttaccagaccgtgcagatcataaaccaaactatggtgagtttaaatttgattggagcaagcgtgaaaatgaatggttccatatggtatcttcagtagaaggaaatgcaccaattcaaattcaccaagatgcgaatttatattccttatcattagaggctggaaaagaaattcattttccagtgaaagaaggccgtcaattgtatcttgtacaaattgaaggaagcagtgtaatcaatggtgaaacgtttgttatgcgggatgcggcagaatctgtagaagaagatattcacattcaagcgaaagagcaatcacactatttagcaattgaattgaaaaaacaataaaaggtttatagaaaagaggacatccgatagatgtcctcttttttggattggaattatctgaaaaatgtttctcaaattttcggtagaggtatcggctgggaaaataagaattgtataaaagtgtcaaaaatctttatgggaatggggaatgttatagtgaaaaagcaagttatttcatcagcattagcgttaactgttatcgtcgggggatttggagcgtttggggcaacgacaacgaaagcggaagaacaaaaaattcaatatcatcaagaatttaaaacacctgcatacataggtgaagaatggaaagcaccggaaggactagataaaaaagagacggtctttcaatacttagagagtaagaaagatatgtttaaattagcaggaaatattgaaaagcattttaatatcgttggagaagaaaaagacgctgaatctgatacgacacatgtgaagctagttgagaaacataataacattcctgtgtacggttctgatcaaactgttacacttgataaagagaataatgtaaaagcattcttcggacaagttattccgaatttagatgataaaaatattcctgcagctgcaagcattactgcggaacaagcagaaacgattgcaaaggcagatattgagaaagaaattggtaaagtaaagagttatgacggtgtgaaaaaagatttgtttgtatatgaaaaggacggtaattactaccttgcatacttagttaaggcatcgatttcaaaaccagctccaggatattggcattattttgttgatgcaacgaatggaaatgttattgagaaatataacgctgtagataacattactggatttggttacggagtattaggtgctagacaatcatttgaaattgctcaagatacgaaaacaggacaattcaacttgtttgatggtaaacgaggacaaggcattcatacatttgatgcagaaaatatggacgagaactggtttaatttattctcacaatggcttggatatacaggagaagaagttgaaagtaaatctaagttcttcgaagataaagctgcagttgatgcgcatgtaaatgcagggaaagtatatgattactacaaaaagacatttaatcgtaactctttcgatgataaaggtgcgaagcttatttcaactgttcacgtaggtacagcttggaataacgcagcttggaatggtgtgcaaatgatgtatggtgatggagatggaaaaactttcattccattatctgctggacttgatgttatcggtcacgaattaacgcatgctgtaactgaacatacagcaaaccttgtttacaaaaatgagtcaggggcgttaaatgaatcgttatctgatattatgggtgttatggttgagaagaagagctgggatttaggtgctgatatttatacacctgataaacctggtgatgcgcttcgctctcttaaagacccagcgtctattccaaacccattaaaaccaagtgaaggttacccagatcactatagtaaacgttacactggaacagctgataatggcggcgttcatattaacagcagtattaacaataaagctgcatacttagtatctgaaggcggggatcattacggtgtgaaagtaactggagtgggccgtgaagcgacagaaaaaatttactaccgtgctcttacgaaatatttaactgcaaactctgacttcaaaatgatgcgtcaagcggcacttcagtcagctgaagatttatacggtaaaaactctaaagctgtacaagctgtaacgaaagcttatgatgcagtaggtgtaaaataataagagaaaagacctgacatcctagtcaggtcttttctttatcccgctatccgcaaatgatgaaatttccactttatttagtcgcgaatacctaatgcgattttcgccatacgtgacatacgttctttcgaccacggtggattccaaacgacatttacttctatttcattaacttcaggtacgtttgttgataatacttttttaacgtctgatacgatttgcccagccattggacaaccgatagaagtcatagtcatcgtaatgacagcattattattttcatctgctgtaacatcataaactaatccaagattaacgatatcaacacctagttcagggtcaataacagcttctaaattggcaagtaatttattttcaaatgcttcttgtgacataagcagcccctcctacactttaatgatatcgattctcattataacggaaatgagcataatgtgcaggaaatgagctcgaaaaaatatccctcttcgcaagagggatattttttgaacatctattctgttttaaaatgagatacgagctgatctaactcttcaactgtttgtttcatttttctagcagttactgtcatttcattcataacgataactttctgttcagcagattgtgccgttgcggcagtttcgctggatacttcagtagagatagaagcgatgttattaagtgaagcattcatttcttcagcacttgcagccatttcttcagcagttgctgatatatcttgcatttgagtagatactttatttacttgttccacaattgttgtgaaagaagtaccagcttcacgaataacattgataccttcaaatgcttcagaacggccttgagacatcatagagctagcagtttctgtatcattttgaatttgatgtagtaattgattaatgtctgttgcagctgttttagattgttcagcaagttttcgaacttcgtcagctacgacagcaaatccttttccttgctcgccagcacgagcagcctcaatagaagcatttaaagcaagtaagtttgtttgctcagcaatattagaaatagattgtacagcagtatcaatatatttcgtatgagtgattagacgttcaaccacttctgacgtagcatttacagcttcgtgtattgttgtcatttgtgaaacagatttttggataaccgtacttccatcgctagcatgttcagatgtggcaacagcaagttccgctacagatgaagcagattcagcgatgcgctgaacacttactgccatatcatccattgcagttgaactttcttccatactagaagtttgtgattgaatacttgcatttaagttggacatcgagctttggactcttaatgtcgcctcacgtgatgtatttgttttttctagcatattttcagaagcggtttgcacttccactgatgttttttgaacacgattaatgatatgttgtaggttttctaacattttattaaatgatgttgcgatagcacctatttcatcgttgctatttacttgtagacgtgccgttaagtcaccttcttgagaggccaattcttttagtttcgtgtcaatttgttgaattggtttcaccagtttaccagagaaccaccatgcaagaataattgcaacgacaatacaaataacaagtgatagaaagactgcatattcaattcctagtgaagattgatcaatttgttcaatagattgttcacgtaatttagcttgttcattactgtactttgtgaagtcaccaattactttatagaccgttccgttttctgaagaagctacttgtaaagcttcttcccatttttgttcttttgcaagagtgaatactttttcttcaacgaactttctccaagtagaccctaattccattgtactttttacggacgaagaaagatttggattagaaagaagtttatcttttgaatcctcaagacgtttactcatctcattaaacttgtctaattcgacttgatcatgttgtagtaaataaccccttaaagcagatagctgtacttgataagcgtctccacgttctttcaattctgttgccagtggagaaatttctttttgtaatgtttcagctttacgagattggtcaatagcaaaaaataaaataaaagctaaggcgatgccaaataaagcgcaaatcgttcccatcatgaacataagtttttttctgatacttacaaaattcatatgattaaaagcctcctttgtgaaatcttagtattagaattaataaatgtaaaaaattgaaagaaagctttactccagttggaataaagctttcttatttcctttaggaattatagcagacggaatgagagatagaaagagatattttaaattgaaaaaagagagactgtaaaatattctttcctatacctttgggcttgtgtcattacaagcgaaaggttcactttaagcgtttgttttgaaatgagagacgagaacttcaagttcttgtacgattgttttcatttcagatgatttgttagccacgatactcattttgtttacttgatcaccagctgaatgtgctgtttgtaatgtttctgcagcaacttcatttgaaatagaggcgatattatttaaagctgcgttcatttcttcagagcttgcagccatctcttcagcagttgcagacatttcttgcatttgcgtagagactttgttaatgtggttaacaatttctgagaatgaagatccggcagtacgaataacagtaattccttcagaagcttctgcttgaccttgtgtcatcatgtcatttgctattttagtatcggcttgaatttgatgcagtaaatggttaatgtcagttgcggctagttgagattgttcagcaagttttcgaacttcatcagcaacaacagcgaatcctttgccatgttcaccagcacgagctgcttcaatagaagcatttaaagcgagtaaatttgtttgctcggcgatattcgaaatagattgaagtgcagtatcgatatgatttgtatgtgtaatgagtcgctcaactacttgtgatgtagcgttaacagcttcgttaattgtgtgcatttgtgtaatagatttctcaatgactttattcccatcatctgctttttctgaagttgtaacagctaaactagtaacagaagaggcggactcagcgatacgctgaacactcgttgccatgtcatccattgcagttgaactttcttcaatgctagaaacttgtgaacgaatattgtgttcaagagcattcatagtttcttgggtccttgcggtattttccatagaagcagtcgtttcgataaatacattttcggaagcttcttttacacttgttgatgtttgttgaacttgttttattataagctgtaagttagtgagcatttgattaaaggaatttgcaatgtcacctatttcatctttacttgttacgtgtaatctagccgttaaatctccatcttgagaagctaattcttttaacttctcatcaatttgtcgaattggtttaacgagtttaccagagaaccaccatgctaataaaatagacgttaatgtacatgtaatgagtgagaagaaaataatatattgaataagtgatgaagaagactcgacgtcagcaattaatgcgtcacgtttctcattctcttcatttgtatatttattaaaacgacctaaaagatcatttacataatctgtttgtgctaaagcaattttggatgcttcgtcccattttccttcacgagcaagaggtagtacctcattatctatgacgctacgccattttccccccattaaaatagcttctttcattccttctgggagcttcttgtcacttgttactttctctctagtatcagctaattttttcccttctcggttgaacttatctaatcctttttgatcatgtgatagtaaatattcttgtaaaccagcaacttgtgcttggaaccaatcgccacgttcttttaaaatcgtcgctctttttgatacatcattttttaacgtttcgatttcacttgcttgattcatggcgaatgaaagaataacaataagagcaatgctaaataaagaagaaatgcttaagagtgtgaacagtagtttttttcgaatactaacatatttcatcgttacccctaccctcgtttaaactgtttattatgatttatagatatttaaaacgaaattaataaaaacattattatgaagttattaatctgttcaatgaaaattatagcagataatggaaggagtcagattgatattagaaaaagttcttaaaatgtatacatttgcatatcataaaattcataaataaatattagaaatgctattgaaatttgaaatgacatcatgtatacttctaattagttgataacgattatcagtatcaactaaaacattactcttcgttatgttggtcatacccctttttgacgacgtaagtcagagacgaaatgttgaaatatcttgtgtcctattctacagaattatggtaatctccaacctcaacttatatgcgtgagcatgcaaaaaggatcctatccgtgaagggatccttttttgcatgctgtcgcaattattgtatatagaccagggatacgttcttcgattctttccggtgcagtagaagggaagagccatctttgatgaggtccgtgttcttcaactagtttttcaattttaaaatgttcttccgcgagtgttgtaatgatttctcctaacgtccagcgacggatggttgttttaggtagcgattctttctgtgcttctgtaagaaggatgctataagcaacatcatcttcaattaattcttcatcgaaataatttccacttgctcgaaatgatggatggtctactcctaatagctttgtgtatattggatggtaatcgcgaaggataagtattccaccgggctttagtagttgagagattgttgtgaaaagtggttttaaatctagaaagtaatgaagtacaccaagttccagtaatacgatatcaaatgatttggagagatttacatctagtacatcagaaacgatgtaatgaatagagacgcctgcggcatcagcaagttcatttgcatattttgcattacttgctgaaatatcaacaactgttacgtcagagcctaaaagggcgagtgcgacagctttatttccttttgagccgagtaaattaataatacattttccttttggggattttatgtaaggtaaataatgtgctacttcgcgcgtgggatctttcatgatttttttcgcataatcagctggtgccccgtggcgattcgtccaagcttcataagcagctgcattccagcttttttcatttatagtgcttagttgtttttgattcaatgttatcactccttttgtgaacgtatagttattcggcagggggatgggatttccttttctttctggataaaagtttgatttttccgtgattaagtcgtacaatactttttatacgtaaaagcgttgaaaaggaaaagtaggatgaacacattctttccagagagcttcggtagctgagaagaagcaagaatattcatttgaacaatggcctttgagcttcgtcctgaacttatcaaatgataatagtaggcggcgacgagagttggtactcgttatcaaaaccacagtataagagcatattgctccgtacttgttaaggctaattatgtgagtaattagcgaaataaggtggtaccgcgactgtttatacagccccgcccttatcttttttaagataagggcggggctttttatatttaaaaggaggaatgtaagatgagtatttttattggaggcgcttggccgtatgcaaatggttcgttacaccttggccatattgcgagtttgttacctggagatattttagcgcgttattacagggcaaaaggtgagaatgtgctgtatgtttcagggagtgattgtaatggaacaccgattgcaattagagcaaaacaagaaggtgtgacagcgaaagaaattgctgataagtatcatgaagagttccagcgatgttttcgtagccttggttttacttatgattgttatacacgtacagatagtgagcaccatcatgaaacggttcaaaatgtttttttacgtttattagaagaaggacatatttataaaaaaacagtggaacaagcgtattgtgaaacgtgtacacagtttttaccggatcgttatgtagaaggaatatgtccacattgccatgaagcagcaagaggagatcaatgcgatgcttgttctgctattttagatcctctcgatttgttagaaaagaaatgtaagttatgtggtagtacgccatctgtagaggaaacagagcatttctattttgcattgcatacatttcagcagcaaattaaaagagctgtagaaattgccaaacaaacagggacatggcgcgacaatgcgattcaactaacagagagatatgtaaaggaaggattaatagatagggccgtatcacgtgatttaccaattggggtaccaattccagtagaagggtatgaagataagaaaatttacgtatggattgaagcagtgacaggctattattcagcgagtaaacattgggctgaagaaacagggaaagatgatcaagagttttgggatagcgaagcgaaaacatattatgtgcacggaaaggataatattccgtttcattccgtcatttggccagcggtattacttggaataggggaggaagcaatcccgcgtcatatcgtttcgaatgaatatttaacagttgaaaaaagaaaattatctacaagtaaaaactgggcagtatgggtgcctgacatattagaacgctatgatccagattctattcgttactttttaaccgtcaacgcaccagaaaatcgcgatactgatttttcatggcgggaatttatttacagtcataatagtgaattattaggtgcatacgggaactttgtgaaccggacattaaagtttatcgaaaaatattatggtggtatcgtgacgaagggaagtattgaggtagagctgaaagataaagtagaaggattatataagcgtgtaggagaggcgattgagcaaactaaatttaaggtggcgctagaaacaatatttgatacagtacgttttgcaaataaatattttgatgaaaagcagccttggaaacaaagagaagatgatccagtttcatgtgaagaaacgatttataactgtgtgtatcttatcgctaattttgcccatctccttgaaccatttttaccattttcaagtgaaagagttcgaaacacattgtcgattgtgaaccgaaattgggaaccgcaaaatacgttgccaagtagaattgatagcgtacagccattatttgagcgaatcgatgtaaaacaaattgagcatgagatagagaagctgtatggagcggtaaaatgagatagagaaaaagacctttcaagtaaatgaaaggtcttttgttatgcagtatgattctctttcttatctttcaaaaagaaaagtacagcaaggattacaagaataatagctgcaatatcatacgttattttaaatgtagtattaaagtttaagtactctacgaaaggagttttcactgctcctgcatatatacaaacgggaacgagaagtaaatcgtaaaatttcttttctttcatatatcttattaggaagaagatacacataatagcaaaaaatacgatgcttaaaatagtcatttatacctccagataaatttacttattttaattgcagttatatcttttatataaattctgtattttttcaagcgctgtgcacgcgattgtgtttcctttctttcctagccgtaagcagctgaggagtgaagatcccaaccaatataaaaataattccaatccactgcatgaacgttacgacttcatgtacaagtgtaattgaagcaataatagcagttggtaattcagctgcacctaatatcgtactaagccctgttccaacctttggtacaccgattgaaaaacaaatgacaggtacgacaacaccgaacaagccgaggaagaaagtatatttccataggccagcttgcaaagcaccgtctgttaaaaaggttggcggaaagaataggcatacgataagagtagcacttgttgtcataagaaagcttttcgtataaggcggaacatccgtagcgacgcgcccgcttgcaaaaacatagaatgaaaaagagacagcagctaatagcccaaagataatccctttcgtagaaaaactttgtccgaggccttcaaatacaccacctgcaaacaatgtaccagcaaataaaataaggatagatatgatcttatcgtggcttggaaatgttcgatttgcaatggcttcgataatgacaccaatccaagtgaactgaaagagtaggacgacagcgatagatgcgggtagttcttctacagaaatagcgtaaaaaatcccagtcatactcattgttgttccgacggttagtaatgaaaaaaattgtttttttgttactttatgatgtgaaaagaaaagaacgagtagaaatagtccaatccatccgaagacatattgtccccctaggagttgatgtgctgaaaatccatttatgaatccgagtttgaaaatagttgaaagtatgccgtagctgcaagcaccgaataaaacgagcaatgaatatttaaacttttccataaaaaatcctccttttaagtaataaaaaacgcccgctatccaaataaggataacgggcgaacgaaacagagtaagacactctacaaaattccgccactcacacatgaagtatgagtttggggtatgtaattatagtgaatgttacattgcttttgggaatacaatggagcattttacaccttgagctgtgttttgtatcccgtaaggaaactgatgtttatctaatatttgtttcacgatatataatccaagaccactaccttgtactaacccgtgtttatcaggatttgcgcgatagaaaggctcaaataaatgagcaagtttatcttcatcaatttgtgaacctgtatttaatacttctaatgcgtaaccatttggtttttcataaagctttatatatacgtgctgatggtcaattgtataatgaattgcatttgaaataatgttaaaaatagcagtttgaataaatttaggatcagctaaaatttgtacgtcgtgtttaatattagattgtacatttaattgttttacagatacaaagtaatctactttcttcataacatcctcaataatattagataaagaaatgacttctaaattcggtttaaattgagggttttgtattttggataattccgacattttttccgttaatatgttaatgtcttgcatcatctcgtaggaacgtttcaaatacttatctctatctttataagctccaattccgtgaatcatgccatctagttgtcccatgacggctgcgattggtgtttttaattcatgggacaccatagacataaattctttacgagattgttctaattgttgttccttcttgagctcgtttcttaaatcttgattgcttgcatgtaaattctttacaatatttggtacttgcgaagcggctacttgcaaattaaaatctgtttgatctgcatttttgttaagtagctttttatcggagaaatcaagattcataatatcttttaaagcatcactcatatattgaaaaggtttggcaattagttttgtataaattaatgatccgagtagtgataatgcaagcattgtcgcgccaatatgtggagctaattgctgcaacgcatctgctaactttggattatcatttgtatcatttgttttacttgctgcattttgtgtatgtaaggcatcattattagcggctttcttttctgcttctgtaggcggattagaagtgctatttttccccgaaagattttgtgtatgttcttttgcctttgcagtttggctaggctgcaaaaggtgattgatagctgtagaaagagatttataatctataatagaagattggaaattagaaatactcccctttgacacagctttattttgcttcgttttacttccgtcgttttgcttatctgaatcggcctgttctgtagtcggcgttccattttctttcgcaaaacgttctttatcgtagtttgaagctagaaagtaaataatttgataaagacaaagtgataaaagaatacaaaataataaggttttgatgaaaatatttttggtgatgttgtctttgctacgattcgattttgtagccaatgcctttcaccgttttaatataaggaattcctaatttttttcttaagtttttaatatgtgtatctataactcttacatcaccataatgttcatagccccataccttattcaacaaatcacttcttgataatacttttcctcgattttgcagtaaagtataaataatttcaaattcttttgttgtcaattcaatttgattaccatgaacataagctgcatatgctgtagagtttaacatcaattcatggaattgtagtatagttgcagcttctgcttccttcgttgctgcccttcttaatacagcctctacacgcttaataaatacagtgtaatggaacggtttcgtaatatagtcatcaatacctaactcaaatcctttaatttcactttcttcattatgtaagcctgttaacataatgattggtacatcagattgtcctcgcataattttacaaatactatagccatctatatctggtaacattacatcgaggaggacaagatcgtatgaatttttttggaaaagaagaataccttctgttccggcaccaactacatcaacggtaaagttttgtgccattagaaattcacgaatcagttcttgtatatctgggttgtcttcaatcaccagtatatgcgtcatagtaacacctcctaaataacgctttttactgcaatattcgaattcatcatttttcgagtgactcagattgtttatacatataataagcccccgctataaaataatcatgaaggtagcaaggggaatagtttagtgttactgaataattcagaattacagtagttctattatagtatgtattataaaatttataaaatattataactgtataattttaatatctacgtttatcaatgtttagatattagctaatcaaatctattcctattatatatgtaaatacagttgttttgctactgtaaatgaataaataaaataagccaagacataaaattcttggctacacataaatcttgtttttaggctattttacagtgacagtagcttgctgctgaacgcgctcaaataaccagtgtatatcattgttatacatacgaatacaaccaagtgttgtccatttgccgattgcttgattattgttagttccgtgaatcgcataagttgttccgtaagttcctgccatatttaatccgagccaacggtcaccaagtggattacgtggatcgccgcctttaatttttcctgtataataagggcggtttttaattttatttacgatttgaaaagtgcctttaggtgtaggtgttgcagcttttccagtagcgacagtaaaactttttataaattttccatcctgataataatccattttatttaactgagtgtctacgattaattgatctttcgttgtagctgcctctgcactagcgaatggaagagttaaaaatcctaatgataatagtgcgcttaataataattttttcattgttattctccttttactatcgtaatagtcttacatacaatgaagttgtaatcctcgtaatgctttatttacattttcatctaatgtttcaaagaatgtagtgattttgctgttgtgtttgttgttatcaataagtaatctttcatttaataaaagctcaccacgtagtccaaaactttgaacttgaatatttagctcatcttcattttcagaaatgattggtaagaaatagtgaaaagcttttgttggaatgatgtagcttttgccaatcatgctttcttgatttgaattaatccattttttcgtgacaattttaatattcttttttgaaacgataaaagatagtgttgtagattttgttaaacttacgtcaaattcacttgtttcacatatttgtaaattaaaaacggtttcattttgatgagattcaacatttgtattaataaaatcgtgcattttatatgcttccatttcgtattcacccttttttcaatttcgaaaaacgacttatatttattcaaattaatgcttagtcatatattggttaaatttttcaacaaattccgatataatcttacaatacgtatatgaagctaatatgaagttagcatgagtttgtgatggttttttattgagaacaaaataagaaagcttttttagtgctaaaaaatggataaaatctgcatgttattaatgcgtcttttcgctatttcgacttggaaaataatttttactatttaataaagaacgaaaatcattagtgtgacccttacaaaaatgtaataaaaatgtaagctattgtgatagttatttcgacaatttttttatacaataatagtaagaagttgtacgtgattgaaaggagagatgacatggaatggattcatgaattatttcagcaatacgggtattatgttgtacttgtcggcttgctgttagaatatattgcacttccgtttccgggagagccaacattagcatatgcgggatttttagcacataagggtgatttaagtttaccgattttaattattctatcctttattgggacaagtgtaggaatgacgattcaatactttttaggaaataaattaggtatgcctttcattcaaaagtatgggaaatacgtatttttaacacaaagaaaaattgacttaacgagaatgtggtttgataagtatgggtacttcctaatttttattggtttctttattcctggtgtacgtcatttcacaggatactttgcaggaattattaatttaccattccgtcgttttgccattacaatttattcaggcgctctattttgggtatcattcttcttaatcggtggttactggttaggtggaaacttacatgatatctttggagtgctagaagatcatatcggtaaaatcatttttggagttattgtgattgtagcggttacgttgggtattcgtttccgtaagcagttaaaacgagtattactacaaaacgcaagttaatatgaaatccattctatgtcagaatttaggaaggcagtgcaaaagcactgccttttttattttatttttaagactatgtttaatgcacattttacattctttataggaatttgatacaggataagaaataagtattttgtcaattattatagtcgtaatgacaattataattgacaaatataaggatattatttacaattgtaattaaataaatgaaaaagagggaagacatgaagcttcaaaatcgagtgagggaattgcgagcaaagcatcgtttatcacaaggggatttagggaaagcgattggatcatcacggcaaacgattagtttaattgagcgtggggattatgcaccatctatcgtattgtcgttaaaaatcgcacaaattttcaatgtaccggtggaggaaatatttacgttagtagagggggaagaggacgatgaagagtaagagaaaaaaacaatttgattctgtggggaaaatagcattaagtatgataggaggatttttaacgtcttatatagctttaaatttactctcggatgaaccgagaaaattatcatccaatacatttataggtatatgtactatttttggaattttaatgatgtactatacttggaagaatacacgtatgttagcagaggcacgcgatgaagaagagagcgtacaaggcagaaaattaggcattataagtatatatttacgtgtaggtgatatagtgacgcaggcatggtttgtatatgcagttattacatgtagacgtgcactgttgcaggatacaaatgtttcatttgcggtgtggaatttagtagcttctattgtttgtttaactactgtagtaattatcggactcataacaaaaaatcgttataataagctatatcctgaacaaggtgtaacgtatatggaatctatgaaaatgtggacgaaaaacgcagatgaaggattaaagcacattgtgcatgaggctggatataaagcatatgaatttaagaatacaatattggcatatgtatggtgggctgccgttatatatacagctgctagtaatatcgattttgtattaattggcttaatctcatttatttggatattgcatcttgggaagttcatgtacgaaatgcaaaggaaaatgatttattaaggggagaaaaaggtggatattttaagaaggccagctggttcaatgacagtggcgttaatgctgtccattttatacggagtaatccgaactgggaaattagaagtaattttgaacctatgggcaatagttggaatttcattattagtgttagccattcatgagctaggacatgtagtatttggtgtaataggtggtttaacatttaaatttatgacagtaggacccattactattcaaaaagaaaagggaaaattacgcattcgagcaaataaattatgggcttactttggaggcgttgcaacactagtaccaccttctatagagacaccgaatctttcgaaaaaatgggcgtggctcactttaggtggaccaattacgagtttactgtttggtattacttccggttacatatacatggtgagttattatcaatatcttttatatttttcctttttccattttgcaatctttgcggttacaattgtgccgataaaaggaacgcttatgagtgatgggatgcaatttcttattttaattaaagatgatgaaagagctagaaatcatttatatgagattcaaatatcgagtgagttatttagttataaaagaccgaaagattgggatgaaagattagtagaattgagtgaggagaaaataaaagacaataaagggataagagagataatgagtagacttatgcttgtcttttttgctcgtgcagatcaagagggaatggaaagagcgataccgtatatagaaagaattgttcaactacctgtaacgaaagaaaataagtttttcgttagcagttttcatagttggtatcttttatataaagccctttatcagatggatagtctttctttgcaagaagcaaaggaacatgcaaaggctattacaaaaatggacttaaacggatattatcgtacacaaggaattatcaaatatttagagaatgatctagaagcttcccatacttatatgaagaaagctgataaagaattaaagagcgccgagaagagtgagatgggatatttacaattagaaagagaatggtttgagcagttgaaggtgagggtatcttacgatgggtgaggtatcctcttttttctatgtcatcttatgccgttccataaatagtccggggcgagtaaaatgagataagaagagcaaagcttggaggaagtaaatatggaaattttatcaattattttgatagtcttgctcatttatgttgtttttaaagtggcatatgtagcattaaagatactcgcgatcctattaattatctttttaatcgtagagttcggcagtaagttgcttgggggatagggtatgttgtgcgtttcgagtgtcgaaggttgtcgttaaatcgatatcttgtgttgaaccgttgatataatgaaaaaatcgttgatataagtggagaaatgatcgatatatttgaaaaatcgttgatatattttagtgaatacgaagtggggtatgtggaaaagaagttgccgttgggtagcttctttttattgtagtggcagggtatagagcataaataggttgccgaaaattgccggtaagtcgatagcctgtgtcgaacggtcgatataatgaaaaaatcgctgatataagtggagaaatcgccgatatatatggagaatcgctgatataatccggttggtactggatggggtatgtgagaaagaagttgccgtgagggcaacttctttttatcgtgatgcggggtatgcaaaccaacataaaaaagctggaagagtatcttccagcttaagagttactttcaatttgacgaccgctatcttcttcagtgtcttgtaataggttgaatacgtctgctaggcagaatgcaatgaaccaagtccatagaccgtggaagaaagctgagcttaattgaagtggtaatgtatagtttgtcattgagtaggaaatacatccaccaacgattccgatcattgttaataacattgttttttgagcattttcttctggattgaagaggaagtaaatgtatccgcctaaaattgaagcgcttacaagcgtttcgattccattaaagatgatattctctccaagctgagtgtttgtccagaagcagattgttccgccgataatagcaaacaggacagctattgtatatcgtatatattgattcatatgttcatctccctatgtaataagatgatttggaagtcaaaaaggtaggtatagtatattgaagtgagttttaattgtacgtatctttttataaaaagatcattgaagagtaactaagatgatcggttgtttaaaccgttacgtgtatggtgtctgaaatatacccgactgctcgtttctttttgcttgtaaaataagagaaacttccaagtctatatactcttttttttgtgagtctgctttcattataacacatttagggacataataatagaattatctgattttgtaataagtgtaaaaaataaaaagcgtaaggaaataccattaacggtgcagtttagtggaagaaggattttaatttattatgatgaaatatgtaatcaaggtgagatctaagaatgaggcttaaatactataaaaaatgttttatagcatgaatgtaagggaggagagctaacttggagttcacaacagaaagattaataattagaccttttaagagtactgatttacaggatgtatttgctatttataatagtgatgatacatgtaagttcctattacataataagtggactcatgaagacatgcagaaaagatttaataagaagctagcaaataatgtacttactaaagaaacaatattaagtttggcagttatatacaaaactaaagtagttggtgatttatccgtatggtacacaaatatgaaagacactgttgagattggttatagttttgcaaaggaagtagctgggagaggtttggcaacagaagcagtaagtagtttggtattgaaattatttaatgaatgtaatgtacatcgtatacaggctaatcttgatgcacgtaatacagcttcacaaaaattgtgtgaacgaataggcatgagaaaggaagcccatttcatacaagatttttggaataaagaggaatggacagatagtattgtatatggaatgctatcctccgatttgtagtaataaacttagtgattttattatgctaaaaggtacgttagttgaataacaaagggcataacatattatatatgactaatatgttatgccctttaatttattaacctgttttatatgcgtttgaaacggccgacaatttcaactgtttcagtaatgttcataaatgctttgttatccacttgacggataatacgtttcatttcgcctaactcatagcgagtcacgacagtgtaaatcatttttttcttatggtttgtatagccgccgacagcgtctaccattgtcaccccgcgtatgccgtgatgtagtagtgcgctttttatttcctcgcctttttctgtaatagtcattatcgttaatttaatatgtttcgtatgcacagcgtcgataactttgctgactacaaatcgactaattaacgtataaagtgtaatatcccatccgaaaataaaacctgctgctacaagtaagattaagttgaatacaaatatgattgctccaattgaaacatctcgatatttcgctacaatcaatccgacaacatcaaaaccacctgttgaagaagcaaatcggaatataattcctgaagctgctccgcagataacaccaccgaatacagaagaaagtaaaatatcgtctgaaacttggtgtaccgggataatgttcatcgctaacgatgacacagctacaaagtacgctgttaaaaaggttgtcttctttcctaagtaaaagtgacttaaaataagaagaggaatgtttagtaaaaagataagtgcaccgatattgtagtgcattaaataaccgataatcatccctacaccagcgaatccaccgctaatcatattatgcgggataaaaaacatattcatagaaattgcatacaaaatagaagctataaaaataacaaccaactgtatcataaattctaagtgaaatgttttagctgctgggaaggataaaaaggcggtgtcgggaacgtaatcggcgtctcctagttgacccatagtatgtttcatctccatattcatttttgattacaagaagagaataaaggttttttcaaaaactggcaatagttttattataatgcaaaaattttataaatttctaataaatcaagcctattcattgatgtgtgtgaatatgctaaagaaagcgaatacaacgtttcttaattattgttttcttgagaaaatatgcaaaatactttttttgaaaataaaaggaaatagagaatatttgcccgatgtgctaaaatgaccttattaaggatgtgaagcgatggaatttttattgcaggatgcaattctatatatatcgtttgtaacgacagcactttgcttattagaagttttcttccttgctaatgtttctcgctttgtgcgtcaacaagcatcaagcggtagacaaagagcttttgcgttagttgatacatgtgaagatagtgcgggaaatgtaccgctattttcaattttttataaatatggaatgattcgttccgtacgcagacaagaatcaagtgaagagaatgatgaggttggtccgtatacaccaatgtttcgctaaataattacgaaacattggaggaatgaacatgttaaaatcataccgagctgcgctcattagtttatcagtagtacttgtttttgttttatccggctgcagtaatgcaggcacaattgattcacatagtacgggaatatggaaccattatttcgtatatccaatctcgtatatgattcaatttgttgctcatcatataccgggagctagcttcggggttgctatcattattatgacgctcgttattcgttcagccatgattccattagctgtttcgcaatatcgcagccaagcgaaaatgaagaaaatgcaacctgaattgcagaagctaaagaaaaaatacggtgatgtaagcaaagaccttgaaaaacaaaagcagtatcaaaaagaaatgtcagaactaatgaaatcaggcggttggaatccacttgctggttgctggccaatttttatacaaatgccgattttctctgctttgtattatgcgattagcagaacggaagagattcgcacatcttcgtttttatgggtgaacctaggacatgcagatccatatcatatattaccgattattgcagcgttaacgacatttattcagatgaaagttttccaatcgaatattacacctggagaacaagtacagatgctaaagatgcagcaaattatgatgccagcaatgattctatttatggggtttgcggcgccatcaggacttgtgttgtactggataacaggtaacttatttacaatgacacaaacaattgtattaagaaaaataatggaacgtgaagagttacaattacaaaaagcatagagaaacaccgctcattacgagcggtgttttttatttgaatcgttaaggaaattttaagaaaccaatattactattggcgttgtatacgaaagtgtacatgctttagaaatatgaaggaggaaatttcctatgaagaagaaaacagttggttatttagcgattgcaggtgctttatcattcggaatcattggaggagtcggtgttccggcattcgcggcaacaaatactccaacagctgagcaagcgacaaaaacagtgaaaaaagatttagatgacgctacaaaacaaaaagtaaaaacgattatggacgatacaaagaaacagttacaggaactaggtgtaaagcttccggagaaagagaagcgtaaagacatgtttgcaggattagatgaacaggcgaaagaaaaagcgaagtcaattttagagcaagagaaatccggaaaactaacacgtgaacaagcaaaagaggaattaacaaagttaggcgtaaaaatgccggagaaaggtaagcgtggagacatgtttgctaacttagatgagcaggcgaaagagaaagcgaagtcgattttagagcaaaagaaatctggaaaattaacgcatgagcaagcaaaagaggaattaacaaagctaggcgtgaaaatgccggagaaaggtaaacatggagacatgtttgctaacttagatgaacaggcaaaagcaaaagcaaagtcaattttagagcaaaagaaatctggaaaattaacgcatgagcaagcaaaagaagaattaacaaaattaggtgtgaaacttccagagaaagagaagcatgaagacatctttgcaggattagatgaagcaacaaaaacaaaagcaaaagcgattttagacaatgaaaagaaacaattagaggcattgaatgttgatttaccgcaccataagttttttatgaaaaaagatgagaaataattgaatgaagtcgtatctttcgtgtgggggctttcttttgaaagacctccttttattgttggcgttttttgttggtaaatcgatatatttgaaaaatcgctgatataatttttacagctacactgctccaaagatacgagggaattagagaaatattacagcttctgttataatataagaagataaatatttcctatgttatataaaaaatatattgattttttctaacaattcaatataatgaacaataactacaaaattcgacatcaagaagtgatgatgaggacacgatcaattttttacgattctcagagagggaagcctttggctgtgagcttcctaatacggaaaaatagattaccacctctgaactgcagcagtgaacgagcatctagtaattgcttgccggcaaaaaccgttatttagacttgagaaattggtgaagtgtgttactttacgaattgaaacaagggtggaaccacgaatacaacactcgtcccttttttagggaggagtgtttttttatttcatttttgcatcacactaggattggaaggaggatacgcagcatgcatcatgatgagaagaacaaaattggtttaacagtagcactttctatcgtagtaggaacgattattggatctggtgtgtttatgaaaccagggagcgtattagattactcggggagttctaatatggccattcttgcttgggtaattggtggtctgttgacgctagcaagtggtttaacagtagctgaaattggagcgcaaatcccgaaaaatggtgggttgtatacgtatttagaggagatttacggaagtttttggggatatttatcaggttggatgcaaacaattgtttatggacctgctattatcggaacattaggtttatactttagttctttagtgattaattttttctatttagataaagtgtggaatttaccaatcgcaattggaacggttgtgttccttggcgttgtaaatagtatgggaacaaaatacggaggtatcgttcaaacaatcacgacaattgggaagatgattccgattgtgttaattgttgtgctaggtttctggaaagggaatagcgatatttttaacgtagttgtgccgatatcggaaaatcaaagtatcggtatggcaattttagcaacgttatttgcttatgacggctggattttacttgcttcgattggtggagaaatgaagaatccaacaaagttattaccgaaagcaatgacagtagggattttaatcgtaacggctgcttacgtattaattaacttggcattattaaatgtattaccagcagcgaaaattgtagaccttggagaaaatgcaacagcgacagctgcaggcatgttacttggagaatatggcggaaaaattattagtatcggtattatcgtttctattttcggctgtttaaatggaaagattttaacgttcccacgtatcccaatgtctatggcagagcgtggacaacttccattttctaagtttattgcaaaggaaagtccgagatttaaaacaccagcaaatgcgattactgttgaaatcattttaggaattattttaatgattattagtgatccaaataagctatctgagatttccgtattcattatttatattttctatgtaatgacgtttattggtgtcttcattttaagaaaacgtaataagaataaagagcgtgcatatagtgtaccgttattcccaatcgtaccaatcgtagcgattttaggttcgttttttgtaattggtagtgcgattattaacgatccagtaagttgtttcttatcgattggaattgtatttacgggacttccggtgtattggtatttaaataagaagaaagaaacagaatgatgaaaaggtaggcgtattatacgcctaccttttttactgtaaaaaaattgtacttgcttccattttctattttggttactatagtcgtagtaaccaaaatagaaagcgtggggaaagacttgaattttcgtgtttatattttagctatcgcggcttttgtagtcggaacggttgagctaattataggaggaacgctcgatttagttgccaatgatttaggagtatctattagcgcagctggtcagcttataacaatattttcggtagtatttgctttgtcaggtccagttttattagctttgacagggaagtttgaaagaaaaacattgtatgttggagcattatcgattttcttaatcggaaatattatttcggcatttagtgtgaattacggaatgctaatgttctcaagggttatttgtgcggcgagtggttcattaattattgcactatcggtaacacttgcttctagtgttgtagaaccgcattttcgtgcgcgtgcaattggaatcattttcatgggaattagcggatcactcgtacttggagtaccgctcggtcttgtgctcggaaatgcatacggatggcgtgcaccatttgtattaattgcggtattaacagttatggcaattgcttgtatttcattattcttaacgaaagtaccaccgacatcggtattatcaataaaagaacaacttgctactttaaaagataaaaaaattgtaagtgcacagttaacatcatttttgtttttaacagggcatttaacattgtatgcatatttaacaccgtttttaaaagatgtcatgtatgttgaagcaaactggattagtgtgttttactttattttcggaatcgcagcagtaattggtggcggattcggtggctggcttgctgataaatggggatcgaagaaaagtattatttccatcattatcgtatttgcgtgtgcaatcttcatactgccattaatgacattctcattcccactcttcatcattatgatgggactttggagtatgctgagctgggcgatttcaccagcgcaacaaaactatttaattgaaattgcaccagaatcagctggtattcagcaaagtttaaataactctgcccttcacttaggaattgcacttggttcaacagtaggcggagttgttatcgaaaaatcatctgttatatataatgcttgggtaggcggtggctttattgtattagcactgctttgcgcgattttctcgattacgagaggacgctctactcagttcgtgaaagaagaatctatcgtttgataggttctttttttatttgtaaaaaatcgcaggttttagtagaaaggtggagaatttgtatgtagcgaggtgatgtatatgtatacgaatttttcaattattggtcttctaatttcaatgctccctttgtttcttattattcttgcacttagatgggttcgtttcatctataaaaattcagagaaacaagtagagcaaaatgagaaaatcattgagctgttgatggagataaaggaacaaaacgaaaaggagtctaagtgaaaaactagactcctttttattatttaattagtatcttaatttcattaacaaactcttaatttcctcatcttccataaagaggtcatggtgtttctgggtaatctttgcaagtgcaacgtcatgatagaaaaattctgtaaagaactttacgaatggttgtgacattgttttcattgcttgccatgactcttgttctacgccagcaaataaaatttcacgatcgtcaacgatgagtagcaagtagcgctctaatgcattaggttcttcagctgggattagaaaatgcatgttttctaagtctgtttctacttctccaacaataagggattcaatttgaacaccttgttttgctttttgttctagtaaaggaagatattctaaaagagtatcattccaagctgaaatacggattgattcttttgcactttcaatgagttccttactttgaactcgaatagaagattgcatttttaagctccacacacggtcatctgtaaatgatttttttgatatatttgtttccagttctttaatatttgattggaattctgtcgttaatttttcaattgctagctttagtggtaatgctgtatacagttttttcttttctgaaacagaatccattaccattcctttatcgattaggcgtgctagcacttcatatatttttgcttttggaacacctgaatgcttcacaatcgttgtagcatctaatggttcattgcttgatacgacaacttcataagcttggctttcatattgtgagaaaccgaatttttgtaacatagttccctccgaacgaatgagattatattttaaggataatgaactatttgtttttgcacaagtggtagtccgttttctaattgtattaaggtgagaattaatttcaattttttaattttatctattatacttaatataatgattaataagattttaatttaatgcgaaggggatgctggggggaagatgttaagaagtttacgtttaaaaattgcggtagtgttttcagtacttatttctatgatgttcgtaatattgggtacagctgtgtatcaattacagaaagaaaaggaagtgcgttccttagacgagtattctcaaaatgcgatggatcttgtgacagagcaacttacgacatttgttcaaagaacggatgaagatatggggtattacgcgaacagtgagatgattcgtaatatacttcaaggtggggttactccagaagaggaagcgtttttaacgaaagagtttgcagagtataaaaagaatcatcctggtattttagatttatatattggtacgaaagataaaaaaacattaagtgccaatcttgctgaaggtgggcaagtgccagaaggatacgatccaacgacaagaccatggtataaagattcagaggctgatgtaaaaaaggtccactggggacaaccttcttatgaaattgcaacaggaaagttaagtgtaggtgtttctaaagcaattacagctcaagatggatctgtattaggcgttgttgcgatggatgtatcgcttgggacgattcagaagttgcttcacaatattcaatacaataatgacggagaaatgtttattataaatgataaaaatatggctcttgtttatccagaaaagatagggaaagatgtttctaaagagccgcttataaagagcttaaataaagaggtaacaaaatatgcggtcagtacaataaaaggtgaagatgtagttgtttacagtcaatcatttgatacgatgaaatggacgataggaatcttttatccgaaagaaacaatcgatgggctattaaatagtacgagaaatacagttattataatggcatgtattagtttattagttggaatcgtagcttcctacttgttctcaagaagattagcaagaccactgcaactattaaagaatcacgtgcaaaaagtagcagaaggcgatttaacgttgcgaatgaaagtgacaagtaaagatgaagttggagagttgactaagcactttaatgatatggttgaacaaatgaatgaaatggtaagtaaaattaaaaacagcgtatcaacggtgcaacaatcaacgaatagtttacattacttaacgaatgaaacagtagcggctagtagagaagtttcaggagcaatggatgatgtgagtggaggagcctctactcttgcgaatggtgtggatgaagtttcagctcagctcgagaatatggcggagtcagtggaacaaatgaatagctccgttggtgaaataaaaggagtagctggcaaagcggaagaggcatctaagcaaggattaaatacaatgaggaatttaatccgtacgaggggacaatcatcttcgattgttgttcatacagaagaagcatcggataagttagaacaaagagttggatcgattcaaaatgttgttgagcttataaaaggcatttcggatcaaacaaatttacttgctttaaatgcatcgattgaagctgcccgtgcaggtgagcaaggtaagggatttgcggttgttgctgaagaggttcggaaattagcggaacaatcaaaagaggcaaccggagaaatcacaacgatgattggtgatgtacaattagaagtaaaaagggttgtagaagttgtaagtaaattgaaagacattgcagatgtacaaaataaagtgacgacagaggcggaaatggagttccgcacaattatgtcagttgtaaatacgattagtacttcagttgaaaaaattgtagaagaggtacataacataggttacgagcaaggggaaattacagcggtaatgcatacaattgctggtacgagtcaagaaagtgcagctgtttctgaagaggtacatgctgcaacggaatcacaggtgaatcatttagaaaaggtagctcacacgatggaaagtttgacagaacatatgagagatttagaaagattagtcgagcagtttaaagtggaagagtaacatattagtaaaatgatgaggatttcggtaaaatagacaatggatatataagaaacgattataggaggaagactactatggcaattgttgatgtatcgattattccagtaggaacaggtaatccaagtgttagtgaatatgtagcagaagtacaaaaggtgctagagaaaaatgcggatcgcgtgaagtatcaattaacaccgatgaatacaattattgaaggagatcttcctgtcattctagaagtaattcaacaaatgcatgaagttccatatacgaaaggtgcacagcgtgttgcaacaactattcgtattgatgatcgtcgtgataaagtaagcacaatggagaaaaaattaaactctgttcgatcaaaattataaagaaaagcagcgattttcgctgcttttttcatatagggggtaaataaaatgagtgaaaagtttaacgagcagtttgatggtttactggagaaatacactgagctgttacttggagagagcaatgaagagagaaaagaacaggtacagaagtgggcactgtattcttacatagctaagacgatgccagctttagtaaagcattggaatgaaacttatccagatgcgaaagaagagatggtgcagttaattacagatattaaaaggctgaatgaagagaagcgaaatgagcaataaaaaaacttgagggaaatataatcgtaagttttctgtattaatatccttatataatttacatggaatataaagggttttataggcatgtcgaatattttcgacatgcctattttatgcctattaaactccatttttctaaatgtcgaaaaatatttcagttatatttataagcgaaaatatagggttttaaatgtttttatagtattttataaattatctaaataattatttgtatccaataattttaaacaatgatataattttgaagaggggtaaaaaacagataaattacagtcataggggtgaattacatggaacaattaatgcgaaattcgtttcttttcttgtcaaaaaataaagcgctaacaaaactggctaaaaagtacggtttacgctttggtgcaggtcgctttgtcgcaggggagacaattgaattagcgacagcagctattaaacaattgaacaagcaaggactttgtgtaacaatcgattatttaggggaattcgttgataatgaagcggaagcaaatgaaatggctaaccaatcgattgaagcgatccgtgcaattggaagagaaggtcttgattcgcagctttctttaaagatgacttctatgggattagatatctctgatgaaatcgtaatgaacaatatgcgccgtattttagaagcggcgaaagaaaatggtgtgttcgttaccattgatatggaagactatacacgctgtggtaaaacaattgatatctttaaacaattaaaatctgaatacgataatattggtactgttattcaagcttacctatatcgtacagaaaaagatattgaagatttaaatgcttataatccgaatttacgtcttgtaaaaggtgcttataaagaacctgaagaagtggcgttcccagacaagaaagatgtagatgacaattataaaaaaattattaaaatgcacttattaaatggaaattatactgcaattgcttcacatgacgaagcgattattgaatatacaaaaaaacttgctgaagaacacaacattccaagggatcaatttgaattccaaatgttatatggtattcgtaatgagcgtcaacttgagctagtaaaagaaggctacaaaatgcgtgtttacgtaccttatggaaacgactggtatggatatttcatgcgtcgtctagcagagcgtccagcaaacgttgcgttcgtattaaaaggtatggttaaaaaataaccaaggagaaaatactccttggttattttaattgctgaaatgcataatgtgccattttcttcgtatcaggatacagttgcttgcgggtagaagataatacaacattaatgacacgtttaccgtctttttcatccactgttacgactgtatatttgccaagtgctgatagaccgcttttacttccaatcgcatatggatcgtcatatagttcttctcgtccgtagtttgcgatgtttggagagcgttctgaagtatgtagagttgtacgcgttgaattcatatattctaaaacaactggatactttaatgcttctttcgtaataatagcaatgtcatatggcgatactttatttccaagtgcatcagcaccacttgcgtttttgaaagtcgcatgctttgtaccaagttccttcgctctagcattcatcatttttacaaattcattttttgatcctgcaatatgttctgcgatggattcagctattggatctgcactaatgataagcataagttttaatgcctcatcacgctttaatttttctccagcacgaagtttaattttcttgctttgactttctgttttaattgcgttttctgtaactgtaatttcttcatcttcttttacattctctagtaaaagaagggttgtcatcattttggctatactagccggataagagcgttcgtcttcacgtttcccatacaaaatttcacctgtgtctgcatcgattgtaactccgtattgcccagtaatgttgggttgatcagctcttacagcttgttgtctttgtgcataagagaagaaaatcatccctgtaaatagtgtagcaatcattacaatcataactattgttcgtttcattataattccctcatttgttacaaataaattgggcagaaaaagcagccattaatcattatgccacgttctctgcccaaaaatatagcgttatttttcgcccatattatgctttttatattgttggttattaccttgacgtcctttttccacgccgtggttatgcggacctgcatttccagttacactagctgcactaattccagcctttgaagggttcttcttaagttttgccatatatattcctccagtttcgtcagattataaaaagggaaagtgtattttagtgaagaaaatacatatatagcatggccaaatgaaagaaaaatatttatttcagaaaattttatcaataaatatattgcgaaaatttaaacagtatcatatatttattagtagaggctcactcattgattgcgacttatgtcgaaaaattgaatgagcattcattcaagaatagggggagaattggatgttccaaattaaaaaggctgctgttctaggttcaggcgtaatgggttcgggaattgcggcacacttagctaatattggtattccgacattattgcttgatattgtaccacctgcgcttacaaaagaagaagaagcgaagggacttacattagaacataaaagtgtgagaaatcgttttagtaatacggctgtgcaaaaactattaaagcaaaaaccagctcctctgacagtgaaaggaaatctagcactgattgaagcaggtaacttagaagatgatcttgagcgtctagctgatgtagattggattattgaagtagtagttgaaaacttagatattaaaaagaaattatttgaaaaagtagacgctgttcgtaaaccgggctcaattgtaagctcgaatacgtcaggcatttcagttgaaaaaatggcagaaggtcgttcagacgacttccagaaacacttcttaggcacacacttttttaacccaccacgatatttaaaacttctagaggtaataccgacgaaagaaacagatccacaagtattaagcttcatgaaactatttggcgaagacgttcttggaaaaggcgttgttatcgcaaaagatacaccaaactttattggaaaccgcatcggtacgtatggtttacttgttactcttcaagagatggtaaaacgcggctatagcattggggaagttgattctgtaacaggcccacttattggtcgtccgaagagcgcaacgttccgcacattagatgttgtcggtttagatacattcgtacacgttgcaaataacgtatatgaaaatgtgcaagaagaagagcgtgatgtatttaaagtaccagctttcatgcatgacatgcttgagaaaaaatggcttggaagtaaaacggggcaaggcttcttcttaaaacaaggaaaagaaattttagaattaaatcctgaaacgatggaatacgaagcgcgtaaaaaattaaaagctgcatccgtagagttaagtaaacaagaaaaaggattagcgaataaattgaaagcgcttgtatacgcgaaagaccgtgcaggagagttattatggaacatcattacaccaactcttttatactctgcaaaacttcataaagaaattgctgacgatatcgttgcaattgaccaagcgatgaagtggggcttcggctgggagcaagggccatttgaagtgtgggatgcaatcggcgttgaaaaatctgttcaaaagatggaagaaaacggcgtagttgttcctacttgggtgaaagaaatgttagagaaaggtttcactactttctataaacatgataacggcgatagctactattacgataatggcgaatataagctaatcgagcgtaataaaaaagcaatttctcttaagcaattaaaagcaaaaaatggtgtattaaagaaaaatagcggagcgagcttaattgatttaggcgacggcatcctttgcttagagttccattcgaagagcaatgcaatcggtatggatattacgcaaatgattaactacgctgttgatgaagtagaaaagaattataaaggtcttgttatcggtaaccaatcgaagaacttctgcgttggtgcgaacctagcaatgatcttaatggaagcacaagacgacaactactttgaaattgagtgggttgtgaaaaacttccaagatgcaatgacgaaaattaagtactcttctaagccagttgtagcagcaccatatggtatgacgcttggcggaggtacagaagtttgcttaccagcagcgagcattcaagcttctagtgaaacgtatatgggcttagtagaagttggtgttggcttaatccctggcggaggcggtaataaagagctatacattaaacacttaaacaaaatggcaaacggtgtagagtttgatctgcaaaaagttgcaaataaagtgttcgaaacagtcgcaatggcgaaagtttcaacttcaggacaagaagcagtttctcataacttcttaggtgataaagatggtattagtgtgaatggtgatcacttactatacgatgcgaaacagaaagcacttgctttatatgaagctggttataaagcgccgatccgtaaaaagataccagttgttggggaaacaggatatgcaactcttgcacttggtgcggaagcaatgcatttatctggttacatttcagagtacgatcttcacattgctaagaaacttgcatatgtcattgcgggcggaaaagtgccgtacggaacagaggttgatgagcaatatttattagatgtagaacgtgaagcatttattagcttagtaagtgagatgaaatcacaagcaagaatgcagcacatgcttgtaaaaggaaagccattacgtaactaataacgaggggagatatcgttcatgagagaagctgtcattgttgcgggagcaagaacaccaattggaaaagcaaagaggggttcattaaaaacagttcgtcctgacgatctaggggcgttagtagtaaaggaaacgttaaagcgtgcgaattatgaaggaccaatcgatgatttaattttcggttgtgcgatgccagaagcagagcaaggtttaaatatggctcgtaatatcggcggattagcaggactttcttacgatgttccagctattacgattaaccgttactgttcttcaggtttacaaagtatcgcttacggagctgagcgtattatgcttggtcactctgaagctgtattatcaggcggagcagaatcaatgagtttagttccaatgatgggacacgttgttcgtccgaatagtcgccttgtagaagcggctccagaatattatatgggtatgggacatacagcagagcaagttgctgtgaaatatggaatttctcgtgaagagcaagatgcatttgcagtaagaagtcatcaacgtgctgcgaaagcattagctgcaggaaactttgctgatgaaacagtacctgtagatgtgacgttacgctcggttggatcaaacaataaacttcaagaagaaacaatcactttcgcacaagacgaaggtgtaagagcagagacgacactagacattttaggaaaattacgtccagcatttaacgttcgcggttctgtaacggctggtaactcttcacaaatgagtgatggtgcagcatctgtattattaatggatcgcgaaaaagcagtgagcgatggcatgaagccacttgcgaaattccgttcatttgcagtagctggcgtaccaccagaagtaatgggaatcggcccaatcgctgcaattccaaaagcgttaaaactagctggcttagagttatctgatattggcttattcgaactaaatgaagcatttgcttctcaatccattcaagttattcgtgaacttggtttagatgaagaaaaagtaaacgtaaacggtggtgcaatcgcacttggacatccacttggctgtacaggagcaaaactaacactatctcttattcacgaaatgaaacgccgcaacgaacaatttggtatcgtaacaatgtgtatcggcggcggaatgggagcagcgggagtatttgaattactttaaaaagtgcaggtggctcgtttagaacaggagggcgttggaagccttgacgaagaggcgctttttgcctcacaggaaggggtgaaacgaccgactgttttagccactggaactggattatgaaaaaaagtggaagcggcttgttcagaatgtgagggggatggagcttcagacgtagaggcgctctttgcctcgtaggaagaagcgaagccaccgaacattctagccgctggaactggattataaaaaaaaatggaagcaacaaaggtttataaaaacaaaagggagagccagcttctttcaaaaagagagaagcggctcatgaaaatatgaaggaggaaattttcatggaaaaaacagtaggaaatgcggttaaaggcggtagctttttagtagatgagattacgattgatcaagtgtttacgccagaagatttttcatctgagcataaaatgattgctaaaacgacagaggactttatcgtaaatgaagttcttccagagcttgaatatttagagcaacatgagtttgatcgttcagttcgtcttttaaaagaagctggagaacttggtttattaggcgctgacgtaccagaagagtacggcggaattggtcttgataaagtaagctcagcgttaatcgcagagaaattctctcgcgctggtggttttgcaattactcacggtgctcacgtaggtatcggatctttaccaatcgtattattcggtaacgaagagcaaaagaaaaagtatttaccattacttgcaactggtgaaaaattagctgcatacgcattaacagagccaggttcaggatctgacgcattaggcgcaaaaacaactgcacgtttaaatgcagaaggtacacattatgtattaaacggtgaaaaacagtggattacaaactctgcattcgctgacgtattcgttgtatatgcaaaaatagatggcgagcacttctcagcatttatcgtagagaaagactacgctggcgtatctacaagcccagaagaaaagaaaatgggtattaaatgttcttcaactcgtacgttaattttagaagatgcgttagtaccgaaagaaaacttacttggcgaaatcggtaaaggtcatattatcgcattcaacattttaaatatcggtcgttataaattaggtgttggtacagttggatctgcgaaacgtgcagtagaaatttcagcacaatatgcaaaccaacgtcaacagttcaaacaaccaatcgctcgcttcccattaattcaagagaaacttgcgaatatggcagcaaaaacatatgcagctgaaagctctgtatatcgtacagtaggtttattcgaaagccgcatgagcacattatctgaagaagaagtaaaagatggtaaagcagtagcagcttctatcgctgaatatgcaatcgagtgctctttaaacaaagtatttggttctgaagtattagactatacagtagatgaaggtgttcaaattcacggtggttacggatttatggcagaatacgagattgaaagaatgtaccgtgattctcgtattaaccgtattttcgaaggaacgaacgaaattaaccgcctaattgtaccaggtacgttcttacgtaaagcgatgaaaggtgaattaccacttcttcaaaaagcacaaaaattacaagaagagttaatgatgatgatgccagaagaagtaggcgatgagccattagcacttcaaaagtatttagtaactaatgcgaagaaaatcggcttaatggtagctggattagcggctcaaaaatacggtaaagcattagataaagagcaagaaattcttgtgaatatcgctgacatcgtaagcaacctatacgcaatggagtcagctgttcttcgtacagaaaaagcaattaaaacaactggtcttgaaaagaataaacaaaaagtgttatacactgaagtattctgccaagaagcattcaacgaaatcgaagcagatgcgaaagaaacacttatcgcagttgaaaatggcgacatgctgcgcatgatgttatcatcattacgtaaattaactcgccacacaccacttaacgtaattccgaagaaacgtgaaatcgctgcgaaaattttagaagatgagcgttatacagtttaatatctttaaagaacagtagtcgtttatacggctactgttcttttttttgaaaaaaagaaattttttagtggtataaaactaatgctattagtataataaaactaatggcattagttttcgtgaaaagggagatgggactatgaggatgatacatgaaaaaacgttatatcaattgtcatttttgccaagagcgtttcctgtaaattgttactttgtagaggaagaagatggtttaactttaattgatgcggctttgccatatagcgcaaaaggtattttacaggcggctgagaaaataggaaaaccaattactaaaattgtattaacacatgcgcatgatgatcacatcggtgcattagatgcattaaaggaagtacttcctcatgttccagtctatatttctaagcgggacgcaaagctgttagaaggagatacgacgttacaaaaggatgaaccgaatataccgataaaaggcggtgtacctaaaaaagtaaaaacggtacctgatgttttattagaagatggcgaccgagttggatcgcttcttgcaattatgacaccgggacatacaccaggatccatgtcgtttcttgatgtacggaataaagctcttattgttggggatgcattccaaacaagaggaggtatggctgtttcgggacaaatgaaattttggtttccgtttcctgcgatggcaacgtggagcaaagaaatatcattacaaagtgcagagaagttaagcgaatatgagccttccttacttgcggcaggacatgggaaaatgataaagaatccagacactgtcataaaacttgctattaaggaagctaagcggaatatagaaagtaagaaagaggggtaatttatgtcaccgagaatcggacttacattacaaaaaattgtagaaacagcggcagaaattgcagatacaaatggaatacaagaagtaacgttagcttcattagcgcaaaggttagggatacgttcgccctcactatataatcatgtaaaagggttacaagatgtacggaaaaatcttggtatttacggaatcaaacagctgcataacagactagaagaagctactgagggtaaatatacggacgaagcaattcatgcattaggagaagcgtatgtagcatttgtccgaaaacatcctggactatatgaagcaacttttttacgagatgaagaagtaagaaaagcaggtgacggaattgtaaagctttgtcttcaagtattacaacagtatggcttagaaggagagaatgcacttcatgcgacacgcggattcagaagtatttgtcatggatttgcgtcgattgaacagcaagggggatttggtttgccgctagatttagatacgagtttacatgtattgttggaaacgtttattaaaggattacgtgaataagaagcaaagcaaacaaaaaccttagaagtgattctaaggtttttttgtgcatatgattcgaaaagaatggtaggctttttcttatgaaatgatattattttgcaggtttgaaaaatgtatatatcgctaagaaaaagcaaacgaaactgaatacgatggggtcttgatagggactaggctcagagcccttctggatttctgtaaggaagtcatgtgttttcatgtttattgctcctttatataagaatacttttaatgaagctaatacttactaatagagttgcactaataaacaataggaaaaatgtagtgttacgatttttataattgttaagtgctataaatagaaagcaaatgagaaataacatatgtaaagctatagaagtgaataacggctttaaatttaatatatcaatcaacagttttacatagaggattgcgtaaatgataaagaagataactttaacatatttttgcatgagcacaccttcctaccatggtttgtttgaggattatactgttattataaggttagcttttgaatatttgtatttttctgtaattataacatttttttgtatttataaatagatgtgattgatttgaaatgtaagaaagctttttcatgaatacgatttaaaaagaacagaatactaaaggagaatgaaagaagaaaggtaggagtattccatgcaaaatttaacagagcttgaagtagaaaacttacgtcatttaattggtggacacgcaacaattattaacaagttggagcagtatgcacagacgtgtacagatccacaattgaaacaaatgttacaaaaggatgcgcaagatgcacgaaatacgaaacagcaattaatgactttcctaggataggaggaagcggaacatgaatgaaaaagatatggtaaatgattatttagcaggattaaatgcaagtttaacaagttatgcaaattatattgctcagtctgataatgaacagttacaccaaacgttaattcaaattcgtaatcaagatgaaatgcgccaacgtaatatgtatgagtacgcaaagcaaaaaagttattacaaaccggcagcacctgcgaatccgatgattgtgcagcaattaaaaagtcaattaagtgcggaataacaggaaaaagaagacgagcgaatttattcgctcgtcttcttttttatatgtcaataaatacataataaatatttttccagctgtaacaaatatgacgaaaatggaatataacaattcacaaaaaggacaaacgatttgctcaatatttcacaaagtatccatgatttctatcgtgagaacctttataattaggagtgtaaagagcaaaagaaatagattatatgatcaattaggagagattgctatgaaaagacatacaagaaaaattgcaattatcggtactggattagttggatcaagttgtgcgtattccattgtaaatcaagggatttgtgaagagctattattaattgatataaatcatgaacgtgcagttggggaagcaatggatttatcacattgcattaactttacaaatacaagaacaaaagtatatgcaggaagctatgaagactgcaaagatatggacattgttattattacagcagggccagcaccaaaaccagggcaaagtcgcttagatactttaggagcgagtgcgaagattatggaaagtgttgttggcggcgtaatggaaagtggatttgatggtattttcttacttgcatcgaacccagttgatattattacatatgaagtgtggaaattatctggattacctagaaatcgcgtaatcggtactggtacatcactagattcttctcgcttaagaacaattttatctgaaatgctacatgtagaccctcgtagtattcatgggtattcattaggagaacatggtgattctcaaatggttgcttggtctcatgtaactgttggtggaaagccaattctgcaaattttagaagaacaaaaagaacgatttggtgaaatagatttagatgaaattgttgagaagactgcaaaagctggttgggaaatttataaacgtaaaggaactacttattacggaattggaaattctctagcatatattgcgagttcaatctttaatgatgatcaccgtgtcattgctgtatcagccattttagatggtgagtatggtgaatatgatatttgtacaggagtaccagctattattactagagacggtataagagaagttgtagaactcaatttaacagaggatgaagaatctcgattcgcaaaatcaaacgatattttacgtgattatatgaaaacaattggttactaacttatagaagaaggtgaaacaaatgaaggaatatataatgtctcgtgtatttaaagcatctgctggaatcgcacaaggtattttcgtatccctcggaattggtttactgatcgaaaatataggaagaattgttgatataccattacttattacaatcggagttgttgcaaaatcactaatggcaccggcaattggtgccggaattgcttttatgctcggtgcaaacggtcttgtaatcttctcagcgatggtagccggagcaattggtgccggatccatttcaattactgaagctggtctaattattaaaacaggtgagccaatcggtgcattattaacagcaactttagctgtatatattggtaaacgtttaagtggaaaaactgcgttagatatgatgctcgttccatttgcggccatattaggttctggtttagttggtatttggttatctcataatattactcctgttttaaatacagttggaacgtttattaaagatagctcagctggtagcccattcatcgcttctatcgtcattgcagtcgtttggggactattacttatctctccagcttcatcagctgcgttagcaattgcacttagcttagacggtgttgcaggtggtgctgctcttgccggatgcgtcgctcagtttatcggattctctgtcatctcagcgaaagaaaataatttaggtggcatattagctcaagcactttgtactccgaaagtacagttaccaaatatcactaaaaatccaatgattctcgtcccaactgtcgttgccagtgctatagtcggtccagtatccgcattaattttccaactggaagcaggaaaggaaattgcaggtcttggattaagttctcttatcgcaccaattaatttaatttccagccaaggatgggaagttctcccggcgatggtaattacttatatcgtcattccagtagctgtttcttatatactttacattgctcttaaaaaagcaggtcgtattcactctggtgatatgactgtaccgcaatcttaagttgaaaatctccttactaatagataaaagcagactgagaagccacagtctgcttttttgtcatgctacattctatgattttgttttactggaactcttatcggttctttggccaataagagctgaacgccgaagtaaagtatgcttgcaagcgtcattccagaaacggcatctacaaaggcatgctgcttcgtaaatagcgttgataaaataataagtgtaccgaagaaagtaaggatgtaatattcaaaagcatgctgttctctacgcttaaaggcagctaacataattacgaatgtagtaagaacgtgaatgctagggaaacagtttacaggttgatcgatactataaatatagcgaactagttcagaaaatacatctgttccaacgacagtcggacgcggtacagttgtttgccaaaaataataaatagaaaaacaagcaagctttccaaaaataacactacttaaagtgacataatattgctttcggtcagcaaagcagtaataaataagtgcgccgtataagtatggaaaccaaagtaaataaggaataataaatgcttttacaaatggaatccaatcatctactacagttgtaacgtctactgcgtgaacagtcgatttatttaatacgtcgtaaaggggacttacgagcacgagtagaagtatataacttaacggaagaaaagatgaaagtttaaatttcttcatgttgatctcctatgtttagtaatgtaagtaaattcaattgattataatatagaaacgtgaattgggctatcgattttacttacattttcttgaattaaccttacgtttttgtcacttgactaaaaagaaggagagggtgctaaatgaagcgtttatcgtatttcttattttttatattgatatgcctagtaggtgctgggtgtgcaaaggataaagcaggagagaaattagaatataacggaagagcactcgtaattggagttgttggagaaaagccgaaagatacgtttaggaatgtaaagtttgaagaaatgaagttagaggaactggaaaagaaatctaaggaagtggatggttttctaataatgaaagatcactttcaagaagcctcaacagagcagtataaaaatgtattttcatcgctaaagaaaccagtgttttttatcggtttacaagataaatcatattcaatttttattacaaaaggaatagagtataacagtgcacgaaaagatgtaaatgctatgtatacgcaaggctttgcaaatatcggaagtggtgaagggcaacaatgggcaattggtttatctaatggtggaaatacagaagaaagtattcataatatgtatatcgtcgtatttcaaaccatcgcagattatttgaatagatgatgagggagcctgtaaacgaggcttcttattttttaatcaaacgtttgtttaagctgtatgttcggtaggaagaaactgatgtaactcaatggttaacaaagagaaatggagaattaatcaaacgtttgtttaagctgtatgttcggtaggaagaaactgatgtaactcaatggttaacaaagagaaatggagaattaatcaaacgtttgtttaagctgtatgttcggtaggaagaaactgatgtaactcaatggttaacaaagagaaatggagaattaatcaaacgtttgtttaagctgtatgttcggtaggaagaaactcctgtagttcaaaggttaagaaagaaaaatggagaattaatcaaacgcttgtttaagatatatgtttggtgcagaatctaaaaaatttatatatttatttttttcttaacaaatggcggaaaaataagaaaaattcgcaggattattaaaaattatcacgaaataagtaaaagtttagcgaataatggtttgaaataacaaaacgttttctatatgataaaggtaaaggttagtaaaaaagtaggtgaatttatgacagtaacattttattcatatccaaagtgtggcacatgtcaaaaggcaaagaaatggtttgaggcaaacgatgtagcatatgagatgattcatattgttgaaaatccaccatcaaaagaagatttacgtaatttacatgaaaaaagtgaattaccattaaaaaaattctttaatacaagtggaatgcgttaccgtgaacttggtctaaaagataagttgaaagatgcaagcgaagacgaaatgtatgagcttttagcatctgatggcatgttgattaaacgtccaattgtaacagatggaacgaatgtaacacttggttttaacgaagagcagtttgaaagtgtgtggaaaaagtaccaataaggtatttttacataattaatacattcactggaggtacagtcatgagcattccaaataatttacgttactctgaagaacacgaatgggtaaaaactgaaggtaatgaagttgttatcggtatcactcactttgcacaaggtgagctaggcgatatcgtattcgttgaacttcctgaagtaggtgcaacaatcgaagctgacgagccattcggaagcgtagaatctgttaaaacagtttctgagttatacgcacctgtaagcggtaaagttgtagcagtaaacgaagaattaagtgaccaaccagaacttgttaacgaatctccatacgagggtgcatggatggttaaagttgaactttctgatgcaagccaagttgagaagttattaactgcagaaaaatatgcagaaatgacaaaccaagactaattgtagtcgactaaaggacagcctttgtgctgtccttttttattttgtgtgaaataatgaaattcaagttatatgtaaataaataagctattatgagaaaaactgttttgtggtaaggtttcataagtcttcacaatctaaacgagccgcttgcgcttttcattgtccagctccacctcctagcccttcatgtctaagaaccttccgtacgagaagacaaaaagcgtcttctgtacgaaagaaccttagccaacagggctaaacagtcggttccgcttttcgttgtctagctccagcggctagaacagtcggtcatttcactccttcacttgaggcaaaaggcgcctctagttcaggagttccaatgccctcctgttctaaacgagccgcttccgcttttcttttgcaaaaataaacaggaaacaacatgaaaataacgaatatactatatactaagttcaaggttatatagtatatggtgatcgggtgatgacatatgatttatgtagaaaaagtcattattgtagaaggtacatcagatagaagaaagattgaatctattattcgtgaaccggtggaaattgtttgtacaaatggtacaattggtttgtcgaaaatggatgagctcgttgatcagttttttgataaggaagtgtatgtgctagtggatgctgatgatgctggagaaaagttaaggaaacaatttcgaaaagaatttccgcaagccgagcatatctatattgatcgctcgtaccgagaagtggcaactgcgccatctacacacttagcaaatgtattatggggagccgacattgacgtttatacagaatatttacggtaaggaatgatagaagtgattgattggacaggagccgaagctacagccctaatagagaacgaagaaaaaacagtattatatgtatatactccaatgtgtggaacatgccaattagcaaaaaagatgttaacagttgttgagatgacaattgaaggcctcaaaattgggatgttagatttaaattatgctccgtatttagcgaaagagtatgggattgaaagtgtaccttgtttacttgtttttgaaaatgggacactgatgaagaagatatacgcatttcattcggttgaatatttatatacggaattaaagtaggcggcaaaatttttgccgcctcgacatatttcttgggaaatatgtcgagatgcagggtggatacagtatttgtcgagcgaaaataacaggattgctctttagtgagagggaatggtatgtaatagaaagtgatatgaaggatgtgatttagggtgagattatattctttgcttcaatcatttgtaaattacgctaatggtcaatatcatttagaaccgcttttaagacaagaagaaaaaactgttaattttcgctttggagatgaaagttgttcgttacaaatttcaagagattatatagagctggtacatgaggaaagaggaacggaacaaatcatttgcttagatgaaaaggatatagaacaattggtgaatggaaatgtacgattgcaaatgttaatgaacgatggacgtgtacaatattcaggaacgtaccgaacgatgttattagtggaatcgatgtttcatatatgtaaaccgatgtcagtaggtgcttaaaattctgaagtttcattttttgcgaaaatttctgttgacatggtgagtgtatattgatacaattcaagtcataaaatatagacaatttcataaatttcaaatcagacgaaaattgaatctgatttctcttatcaagagaggtggagggactgtgccctgtgaagcccggcaaccgtcaacttatgttgaaatggtgccaattcctgcaaagcgaatgctttgagagatgagagagagggataatgttgttatatacgcatataaacctttctgcttctctaaagcagaaaggtttttttattgtttgaatgtggaggacattcaaataataaaagtaatgataacattggactacacgcattaaaaataaaaaattgcggagtcgatccaaacaaaaaaggggtgaacatcatgattctattagagaacgtaaagaaaatatataaggcgaaaagcggtgatgtcactgctgtagataacgccaatttaaaaatagaaaaaggcgaaatatttggtgttattggatatagcggcgctggaaaaagttcgttaatcagattgtttaatcagttagagaaaccgacttctggccaaattacaattgcgaatcgtgttatatcagcaattacaggaagtgaacttcgtaaggcaagacaagaaatcggaatgatttttcaacacttcaacttactttggtcacgaactgtacgtgaaaatattgagtttccacttgaaattgcaggtgttgataaagcgaagagaagaaaacgtgttgatgaattaattcatcttgttggattagaaggaagaggagacgcgtacccatctcagctgagtggaggacaaaagcaacgcgtcgggattgcaagagcattagctaacaatccacaagtgcttttatgtgatgaagcaacgtcagctcttgatccggaaacgacagatcaaattttagatttactattagacattaataagcgtcttggtttaacaattgtactcattacacatgaaatgcacgtgattcgaaagatttgtaaccgagtggcggtaatggagagaggaaagattgtagaaacaggtccagtacttgatgtattccgtaatccgaagcaagatattacgaaacgatttgtacagcagttaacagattctgaagatacaaatgaaacaattgaaaatttaattgaaaaatatccagatggaaaagtaattcgtttgcagtttatcggtgaggctgtagaaagaccagtgcttcaacgattaatgcaacgcagtgatatagaagttagcattttgcaaggaaatattgcacaaacgaataacggttcttacggtagtttagttgttcatttaaatggtgaggaaacagcgatccagcaagcaatagaaggaattcatcaagatcaagtagagctggaggtgattgcacatggataagttactcgcaaatgttgattggaatcaaatgttagaagcaactggtgaaacgttatatatgacggcaatcgcagcccttgcgacatttgttttaggactaattttaggattgttactcttcatgacagcaaaagataatttatgggaaaacaaatcaattaatacggtgattggagcattcgtaaatatattccgctctataccgttcatcattttaattattttattaatcccatttacaaagattcttcttggaacaattcttggagcaagtgcagctctgccggctttaattattggagccgcaccattctacgcgagaatggtcgaaattgcacttcgcgaaattgataaaggtgtaattgaagcttcaaaagcaatgggagcaaaaacaagcacaattattttgaaagtgttaattccagaatcattaccagcattagtatctggtattacggttacgacaattgctttagtaggctatacagcaatggcgggagttgttggtgctggtggccttggaacacttgcttacttagaaggattccagagagggaataacgatgtaacaatcgttgcgacaatttgtgtattactagttgtatttttaatccagtggattggtgatagtttaacgactcgaatagataaacgataataaaaacgggaggatattttaaatgaaaaaattattacttacggcacttatttcaacttcaatttttgggttagctgcttgtggcgggaaagataaagatgaaaagaaacttgttgttggtgcttctaacgtaccgcatgctgaaattttagaaaaagcaaaaccgttacttgagaaaaaaggaattgaattagaagtgaaaaaattccaagattacgtgttgccaaataaatcgttagcggataaggaattagatgcaaactatttccagcacattccatatttagaaaaagaaattaaagataaaaaatatgattttgaaatagcagggaaaattcatattgaaccaattggtgtatattctcaaaaatataagagtttaaaagaacttccagacggggcgacaattattatgagtaattccgttactgaccatggacgtggtttagcaattttacaaaaagaaggcattttaaaaattaaagacggagtagatccagttagtgcaactccaaaagatattgcagataatccgaaacacttaaaattcaaaacggatattgagcctggtttgttgccacaagtgtataacaataaagaaggcgacgctgttttaattaactcgaactatgcaattgatgcgaaattaaacccagaaaaagatgcaattgcaattgaaggcgatgattctccatacgcaaacgtactagtggttcgtaaaggtgataaagataaaaaagcgattaaagagcttgtagaagtattacattctaaagaaattgaagactttattactaaagaatataaaggtgcagttgttcctgtaaaagaataattgctgaaaaagggctggtgtatgccggtccttttttactacataactatagggagaaggggacgtcatatgaaaaagattctattgtcagttgttacagcattatctgtatttacattagctgcttgcggagggaaggaagagaataagcttgttgtgggagcttctaacgtgccgcacgctgttattttagaaaaggcacagccgatattagagaaaaaaggcattaagttagagattaaaaagtttcaggattatgtactgccaaataaagcgttagcggataaagaaattgatgcgaactacttccagcatattccgtacttagataaagaaattcaagaaaagggatataaaattgtaaacgcaggaaaaatccatttagagccgatgggtatttattctaagaagtataaaagcttaaaagacttaccagatggcgggacagtgattatgagtaataacgtagcggagcgtggccgtatgctagcactgttacaaaaaggcggcgttattaaattaaaagacggagtagatgttgttaaggcaacagtaaaagatgtagtcgaaaatccgaaaaacttaaagtttaaaacagatgtagagcctggattgtcaccaaagctgtatgaaaataatgaaggtgatgctttatttattaattcaaactatgcaattgatgcaaaattaaatccaacaaaggatgcaattgcgattgaaggagcggactctccgtatgcaaacatcattgcagttcgtaaaggtgatgagaagaaaaaagaaattaaagagctagtagaagtgctacattcaaaagaaattcaagattttattaataaagaatataaaggtgctgtacttccggtaagtgaataaatataaggaaagggctggaaaattaccagtccttttttctttatataaataagaagaaaggtgtatcatagaaagatgtgaaggaaatacttatatacatttgtgaaaaaacggttactttttttcgtcgtttgcgatatcattttatttgatataaaattagaatgagaataaaatgagaatatgaacgttttaggaatttttaaaatgtatatataggattaatggaggtattgagatggctggttctacattaacggttaaagacttacacgtatcaattgatggcaaagaaattttaaagggtgtaaaccttgaagtaaaaggtggagaaatccacgcaattatgggacctaacggaacaggtaaatcaactttatcttctgcaattatgggtcacccaaagtatgaagtaacagaaggtagcatcatcatcgacggtgaagatgtattagaaatggaagtagacgagcgcgcacaagcaggtctattcctagcaatgcaatatccaagtgaaattagcggagtaacaaacgctgacttcttacgttctgcaattaacgcacgtcgtgaagaaggcgatgaaatttctcttatgaaatttatccgtacattagataaaaacatggaattcctagaaatggatccagaaatggcacaacgttacttaaacgaaggtttctctggtggagagaaaaaacgtaatgaaatccttcaattaatgatgattgagccaaaaatcgcaatcttagatgaaatcgactcaggtcttgatatcgatgcattaaaagttgtatctaaaggtattaacgaaatgcgcggcgaagagttcggttgcctaatgattacgcattatcaacgtttattaaactacatcactccagacttcgttcacgttatgatgaacggtcgtatcgttaaatctggtggccctgagcttgcacaacgtctagaagctgaaggttacgactggattaaaaaagaattaggtattgaagacgaaacaacagagcaagaagcgtaagagaggagcataaacatgacaatcggtacattacctttcgatcaagaaacaatccgtcaacgcgcaagcgaagtaaacgaagctgcttggttgactgagttccgcttacaagctcttgcacaagcaactgaacttccaatgccaacgcctgataaaacgaaaattgacaaatgggactttatcggaaaaggcgacgctgctaagcaagagcctgtaagttctttaactgaacttccagaagcagtgaaaaacttaatcgatgaaaataacagcgtattagtacaacgcactggtacaactgcattcgtttctttagcagacgaagcaaaagaaaaaggtgttatttttacagacatcgtaacagcagcaactgagcatgctgaactagtacaaaagtacttaatgaaagacggcgtgaaagtagacgagcatcgtctaactgcacttcatgctgcattaatcaacggtggtgcattcgtatatgttccgaaaaacgttgttcttgaaactccacttcaagctgtattcttagtagacggcgaagaagctaacgtatataaccacgtactattcgtagctgatgcgaacagtactgcaacttatgtagaaaactatgttgcaaatgaaaatgctaaaggtattgcaaatatcgtagcagaagtaatcgtggaacaaggcgcacaagtgaaattcggtgcagttgatctattagcaaaagacgtaacaacttacgttaaccgccgcggcgttgtaggacgcgacggccgtattgattgggctctaggccttatgaatgacggaaacacaatttcagagaacgttacgaacttaatgggcgacggttcatatgctgatacgaaaacagtaacaattggccgtggcaaccaaacacaaaactttacaactaaagttgttcacttcggtaaacattctgaaggttggattttaaaacacggtgtacaaaaagatagtgcaacatctatctttaacggaattggtaagattgaacacggtgcatctaaatcaaatgcacaacaatcttctcgcgttcttatgttagatgaaaaagctcgcggtgatgcaaacccaattcttttaatcgacgaagatgatgtaatggcaggtcacgcagcttcagtaggtcgcgtagatccagtccaactatactacttgatgagccgtggtattccaaaacgcgaagcagaacgtttagtcatccatggattcttagcacctgtagttaatgagcttccaattgaaggagtaaaggcacagcttgttgaggtaattgaaaggaaagttcgctaatgaatattcatgaaatacgcaaacagtttccaattcttgatcaaaaagtgaacggcaaacaacttgtttatttcgatagtgcagcaacttctcaaaaaccaattcaagtcattgaaacgttagaacgttactataaagaatataattctaacgtgcatcgcggtgttcatacgctcggtacgaaagctaccgacgcgtatgaaggtgcacgtgagaaagttcgcaagtttatcaatgcgaaatcaatggaagagattattttcacgcgcggaacgacaactgcattaaatacagtagcggctagctatggtcttgaaaatgtaaaagagggcgatgaaatcgttatttcttacatggagcaccatagtaatatcattccgtggcaacaagttgcgaagaaaactggtgcaactttaaaatatcttccgcttcaaccagatgggacaatttcaatagaagatgctcgtcaaacaattacaccgaatacaaaaatcgtttctatcatgtatgtttctaacgtacttggaacgattaaccctgtaaaagaaatcggagcaattgcacacgaaaatggcgcaattatggtcgttgacggtgcacaaagtacacctcacatgaaagtagatgtacaagatttaaactgtgatttctacgcattatctgctcataagatgtgtggccctacaggtatcggcgtattatatggtaaaaaagaattgctaaacaatatggagccaattgaatttggtggtgaaatgattgatttcgtagatttacaagaatctacttggaaagagcttccgtggaagtttgaagcaggtacaccgattatcggtaatgcaatcggacttggtgcggcaattgatttcctagaagaaatcggtcttgataatattgaaaagcatgagcatgaattagcgcaatacgctttagaaagactatcagaagtagatggcgttacaatttatggtccaaagcatcgcgctggtcttgttacatttaatattgaagacgtacatcctcacgatgtagcgactgtattagatgtagaaggcattgcagttcgcgcaggacatcactgtgcacaaccgcttatgaagtggctaaaagcttcttcaacagcacgtgcgagcttctatttatataatacaaaagaagaaattgatacatttgttgactcgctaatcaagacaaaggagtatttcacaaatgtcatttaataatttagatacgttatatcgtcaagttattatggatcattataaaaatcctcgtaaccatggcgtattagaagatagtgttaccgttaacttgaacaatccaacttgcggcgatcgtattcaacttacgatgaaagtagaagaaggtattgtgcaagaggcgaagtttgaaggcgaaggatgttcaatctcaatgtcttcagcttcaatgatgacacaagcagtaaaaggtaagaaaattgaagaagcacttcagctttcgaaaattttctctgacatgatgctaggaaaagagtacgatgacagcatcgatttaggagatattgaagcattacaaggcgtatgcaagttccctgcacgtattaaatgtgcaacattagcgtggaaagcgttagaaaagggcttaaacgaagataagtaatgttaaaggttcctaaaaacgaggttatctaaggagggacacaccaacatggcgaagcaactgccagatatcggcgattataaatatggtttcaaagacaaagacgtttcgattttccgtgctggacgcggtttaacaaaagaaatcgttgaagaaatttcacgtatgaaagaagaaccacagtggatgttagacttccgtttaaaatcactggataagttctacgaaatgccaatgccacaatggggcggcgacttaaacgacttagatttcgatgaaattacgtactacgtaaaaccatctgagaaatctgagaagtcttgggatgaagtacctgatgaaattaaagcaacatttgataaattaggtattccagaagctgagcaaaaatatttagctggtgtatctgcacagtacgaatctgaagttgtataccacaacatgaaagaagacctagaagctctaggaatcgtcttcaaagatacagatagcgcattaaaagagaacgaagatattttccgtgaacatttcggaaaagtaatcccaccaacagacaacaaattctctgcattaaactctgcagtttggtctggtggatcattcatctacgttccaaaaggtgttaaagttgatacaccacttcaagcgtatttccgtattaactctgaaaatatgggacaattcgaacgtacgcttatcattgtagacgaaggcgcacacgtacactacgtagaaggttgtacagcacctgtttacactactaactcacttcacagtgcggtagtagaaatcatcattaaaaaagatgcttattgccgttatacaacaatccaaaactgggcgaacaacgtatacaacctagttacaaaacgtgcggtttgtgaagaaaacgcaacgatggaatggattgacggtaacatcggatctaaattaacgatgaaatacccagcagttatcttaaaaggcgaaggcgctcgtggtttaacattatctatcgcgattgctggtaaaggccaacaccaagatgctggtgcgaaaatgattcacttagcaccaaacacgtcttcaacaatcgtttctaaatcgattgcgaagcatggtggtaaagtaacttaccgtggtatcgtacacttcggaccaaaagcgaaaaactctcgctctaacatcgagtgtgacacgttaatcatggataaccaatctacatctgatacaattccttacaacgaaatcaaaaacgattacgtttcacttgagcacgaagcgaaagtatctaaagtatcagaagaacaattattctacctaatgagccgtggtatttctgagcaagaagctacagaaatgatcgtaatgggcttcattgaaccattcactcgcgaacttccaatggaatacgcagttgaaatgaaccgcctaatcaagtttgagatggaaggttctattggttaaatagaaatgcggagccgactgttcagacccgttggctaaggttctttcgcacagaagatgctttttatcttctcgtgcggaaggttcttagacatgagggtctaggaggcaaagctggataatatatgtatgaagaaagcgccctgctgtgcagggcgcttttttgttttgcggatttgtcttggcttgggagaggatacccgggtgggtgttcagttaaatatatcagcgatttttcaaatatatcgtccataactcgaaatatatcagcgattatttcaatatatcgacgattcgacaagggatatcgacttatcaacaaattacgacatagcaagaggaacgaataccccgtacccttcaaaaaggaaaggagcatttatacataaagagggcaactgaaagtaatttagattaaaatactgacaaatgcagcaaagaacttatgggaaaatccccacggctaactttctgacaaatccccgctctaccaacaaatccccacactggcaaaaataaagtttctcatataaaaaggacaatcttttgctttttctcacaatgcgagtacaatgtaaaatagcaagaaaagacgaaaagtatttacaggattattgtgtgcgcatagcgtaaatggcagtaaggaactgagaggaggttttttctctgaatacaaataaagaaacaatcatccacctttatcatacaaacgatatacatagtcattttgaaaattggccgcaaatttctcggtttgttctaggggagaaaaagcgaagacaggaagcgggagagactgttttgacggttgatatcggcgatcatgtggatcgttttcatagtatttcggaagcgacgaatggacttgggaatacgaagcttttgaatgaggcgttatatgattatgtaacgatcggaaataatgaaggaattacgttagcgaaggagcatttgaatcggctctatgatgatgctggatttgaaatacttgtcgcaaatttatttgaaaaagaaggggtacgtccgtcatgggcaaggccttataaattgcatacaacgacggatgggattaccattgcttttatcggattaacggtagcttatccagagttttatcagatgctcgattggcatattgaagatcccattattcatttagagtctattttagaagaagtgaaagatgaggctcatattacggttgtcctttctcaccttggaaaaagtatggatgagtatatggcagagcattatgatatagatgttattttaggagcacatacgcatcatttatttgagcgtggtattctactgaataatactttactttgttgttgtgaaaagtgggggcgttacgttggtcacgtgcagcttactgtggatatagagatgaagaaattgctgaaaaaagacggtagggcgattaagacggaacggttaggtgcttatagcgagccgttatccacaattgaaatactgcaggaagaaagtgagcatataatggcagagtctgtcgttcatttaaaagagtcattaccggttgattggtttcatgagacgccgttttctcacatgttagcaagtgcgctgaaaacatggtgcaatgcagagattggcatggtgaacgctggtgtacttcttgaagggttagaagagggtgttgtaacgcgcggagatattcacagaatttgtccacatccaattaatccgtgtgctttgaaagttccaggaaagatattaagagaagttattttgaaagcacgtaagccgaatatggagaatcttgaggtgaaaggattcggatttcggggaaaagtgatggggaaaatgatttacgctggtgtagaagtcattccagatacgattcccgggaataaaattttactcgaagatgtattaattaacggggaatcgctggaattagatcgtatatatacagtaggaacgattgatatgtttacatttggctacttatacccagagctatccacactttctgacaaacaatattatatgccagaactacttagagatgtgttaacagatatgttaataacttatacatcttccgttaaactataggctagttaacttgtaacactcatttttctcttgtcatacagataagaaagagaggagtgtgaactatggttaatgtggagccaattataattgataattatacgtttattgcagttagcgtgaaacttccaaagacgaatttgctagctgtaatgagcgataaaggatatattatgtgtggtgcattagatgtaggtcttttaaatgagaaattaggtgatcgaggaattattgctggccgtgcggttggtgtaagaacgattgaacaacttcttgaagcgccactagaatcggtaacgactggagctgaagcattaggcattccagcaggtacgattggaaaagaagcattattaaaaatgagataagcatatatcgtccctccttcttgcatagaaatgatataagaaggaggtttttttatgagtatatttcgctcgaaaaactcgcggtttcgaaggggacctattgcctttcggtatatactgcttatgtcgtttattctttttgttatattacttacgcaagggttgtggattgtgaataataatattcagccgaccttaattaaatatggggaagtagagacacataaaatggcgacggcaattatgacgaaggcagtaaaggatcgaattaatgaaggattcgatgtagattcattaatgaaagtacagaatgataaaaacggaaaagtatccacaattaatttaaatacaaagcaagtaaatgaaatcgtaacatcaacgaccacatacatagaaaaatatttgcagcaagtagaacaagggaagttgaaggagctaggtattgctgaaaaaaacggcgcgactatggcagttccttttgggcgtgtaactgataatgcacttcttggtaatataggaccagatattccgattcatttcacgccagttggacatgtgaatacagatattaaacaaaaaattgagccgcatgggattaatactacagcgattcaaattgttatggaaatggaagtaacattgcaagtgattattccatttcatacgaaagagataaaggtgaaacaaaatgttccgattgcgacgcgtatcgttcaaggggaagtgcctacgtattatggaagcggaagtgttgctgtacctgataaaaagaaaacagatagttagttgtaaataaagtgaaactcggctcagtcaggcttttactggataaaaaataaccgtagcaatgcagctacggttatcgttttgtatttgctcgttctttgcgctcccaaaggcttaaatgcatgtatggatcgaaggcccattctgtatagccattgtctttatacatgccaaaatgtaagtggggcggaaattttccggctgtaccaggaggtccataaccagtgctaccaacaaatccgattactttccctggctcaacaatttgtccaagctgtatttcttttgaaaacccgcctaaatgagcgtaataatggtaattgttatgaaggtcgcgaataccaatgcgccatccaccaaggcggttccaacctttcgtttcaataatgccatagcaagtcgatcttactggcacgccatatccggcaaaaatatcggttccttcatgaatccttctgccgccaaaacttcttccagcgccgaaagtactacggtagctatggtcactacggatcggaagaggaaaagcatttccttctaaattaatacgtccataatgtttataaatttgggcgtattcgctaattaaatcaactgttttggcacgtctataatattcccagagcataattttaatacggtcttctgatgttccttgtttccttaaaatagtcgctgcggtatgcagaagatcacggtcgctatttgcatttgcaaatccatctttgtcaccatctaaacctattccgccaaatagagaaattgtatggggaagagtatcgttactattaataggtccagcccatatttctggtttgaaataaagggaaatgatggcatctggttttttcggaatatcttttcttacgctccgtatatttctttcatattgatccattgcagctaagtaataccatggaatgcctgaagactgctcggtttctttatatagtgccatgcgcttttcgtatatgctttgctgattatcttcaccgtaagcgatgttttggtggagaagaaaacaaatagaaagcaaaagagaaatttttcgaagcatgaaatagactcctttcacaacatcactctttttagtgtgggatatacggagtatttcattatagggaacgattggaaaaaatcttagaatcttcatttgagcaaatcgctttcatacgttagaatagatatgttacattgaaagaagcgaacacggtaaactatttcatattgtgcggagttgataaccatgacaaaacaaacagaatataagcgcaagcccgaatggttgaaaattaagttaaacacgaatgaaaactatacaggcttaaagaaaatgatgcgttctaaaaatcttcatacagtttgtgaggaagcaaaatgtccgaatattcatgaatgctgggctgtaagaaaaacagcaacatttatgattttaggtgcggtttgtacacgtgcttgtcgtttttgtgcggttaaaacaggcttaccaactgagcttgatttacaagaaccagaacgcgtggcagattcagtagtacaaatgggcttaaagcacgttgttataacagcggttgcacgtgatgatttaaaggacgggggagcagctgtttttgctgaaacagtacgagcagtacgtcgtaaaaacccattcacgtctatcgaagtattaccatctgatatgggtggagtagaagaaaacttaaaaatgttaatggatgcaaaaccagatattttaaaccataacattgaaacagtacgtcgattatctgaccgagttcgcgctagagcaaaatatgaacgttcattagagtttttacgtcgagcgaaagaaatgcagcctgatattccaactaaatcgagcattatggtgggcttaggtgaaacgagagaagatttaattgaagcaatggatgacttacgtgcaaacaatgtggatattttaactcttgggcaatacctacaaccatctaagaagcacttaccagttcttaaatattacccaccagcagaatttgcagagcttaaagaaattgcacttagcaaaggatttagccactgtgaagctggcccacttgtgcgttcttcttaccatgcggatgagcaagtacgttctgcaaaagaaaaaacagcagaagctaaataatgaaaaaagagagctaacgattagctctctttttgtttatactctaaaacggtatttggacatgttaataaaatcttttttaattcttctgtggataattcaattgtaaattcaggtacaccaggtgtaattaaaattttatcgtacgtataaatagcgttatccacaataattgttacatcgtgtgaatatccgaaaggagccacacatcccggcgtacaaccagttttgtctcgcagttcatcaggagaacagagagataagcgttctcctgttagttctttcatctctccccggttgagccttgtgccctctaacgtaaaaaatacgtaataatctccagactttgattttaaaaataagcttttacttggagtgccttgtaagccgagtctctcacgtacaatccgatctgtctcataatcgagtactggttcgtgttcaaatttttcataagaaacatttgttttatgtagtagagcaagtacatcttcgtacatatggagtgatacccctttctattattagtacagtttcttctcgtggcgtcaactgaatgttttggaaagggatattacttagacgatgcttcccataagcgttttatgatacattgttcgtcgattgtaatttcgtaaatatcaggattcgttaaagttctccattcattaaagccaatcgtatgattaaaatgctttaaaatgagcgtaagtaaattgccatgtgtaacaagtagtgttgttgtatggtttaattgtaaaacgtcttgaataagcgatatggcacggtctgttgcttgttttgttgactctccgcctgaaaaggcaatatctatatttgtaaaagtagattctagtttttgcatccaatcatccattggaacgttgctcaatatgcgttcagttaatcgttcatcttcttggatagataagttagcttggagcgcatagggccgaatggaatcgatagctcggacaaatgggcttgaaataatatgatcgatttgtagatgattttctaagagaaatgtagcaagggtatttgcttggtcttttccatcggtcgttaattcagcatcacgtttttgcccagttgctgaacaatgtcgtattacaataattttcttcataattcatccccatctttcaagttgacgctatatacttcgacaaatgtggaaataattcctttttcttgtaaaacggcatatggatttaaatatgtggaaaagtaatgtggataatgaacatttgaggtgcaatcatgaataaaatgatatgtattgtagttagtctttgttttttttatacacttgtccacaacttatgcagagtcgaatcaaaaagtaaattatccaagcaatcgaaataagtcatttgtgagtgaggatattttttataaacagttagataagaaaatttataaagaatacaataatgcagcatatagtgttcgaaaaaaatcttatttaaagaagtgcccgatgaagaattttctttcctacaaaaaacagccgtgggttgtcggagtagtgtgatgcttcaagatttttttgttcatcctgatcgccaagtttatttttttgcttccttttctcaaaatgaagtagaagagtttcataaatatatcgttatagatgcagaaacaaagagggagctgcaagaaggaaaaagctatcatcattgcgacaatccataaaaaataaaccaccaatcggtggtttattttttactccggtacactcattaatttcgctttcattttgcgaataagaacgacagcgccaattgtacaaagaagtgtaattccttctgcaacgaagatattgattgtttttgtttggtaaagggccgcgaaaaagtctacaaatgcgtggaatagtatagcgtatactaggaagatatatttcttctgttttactgcgtataaaacaagcattgtaaaggcaatttgaagcacgagtgccataattctttctaagctaccaaggaagtataagtaggcaggttgctgaattaacatgtcctgtaaaatgctcagctcgggtttttgttcaatcagtcgagcgaagctaccatcgttaatagaattagcaaagattaatgcttgtaatgcagaaaaaccgccaattaaaatagattcaattccgccgtgaccaattccataagcgaagccatctttatattctagatatttttttagtaagaagaagaaggcaacgaagcgtcctaattcttcaaaaataccagcagtcaatccgccataaattgcgaagacaaacggattttctaaaaatggagcgattgttggattaccgcgcataaataggtggaatggtgtttcaagaatttgagtaaatccgataaagataagaacaccaatgccgactactttccaattcatattatattttttacggaaataaacgagtacaataattgggaccagaatcgagacaatgagttgaaagatgatgctggcaattacagtatttgaaaccatactttcaccgctttctaatatatgtacataactattatgcatcaaatataggagagatgaaactttttaagataaaatgaatttacttattgactctaacgttgcgtcatactttatcgtatgtactaagggggagatacaaatgacaatgagagtaaaagaagtagctgatttagttggaattagtgtgcgcacactgcatcattacgatgaaattgggttgttaaccccagacgagacgacagagtctggatatcgtctgtattccaatgaaaatttagagacattgcagcaaattttgttttttaaagagcttggcttccctttgaaaaaaattaaagagattatcatgagtccatcatttgatcgcgaagaggcactagagcttcataagaaaatgcttcttgaaaagcgtgctagattagataaagtgattgcgacgattgataaaacaattcagcatacaaaaggagagattgaaatgacgaacaaagagaaatttgaaggattcgatttcagccataacccatatgaagaagaagcacgtgaaaaatggggagatgcagctgtagataaagcgaacgaatatgcaaaaggtatgtcaaaagagaaccaagaggagtttaatgctatttatagaaatttagcagcgcttagacacggagcaccagattctaaagaggcacaagaagcaattggagtgtggtacgattacttgcaaaacttcggtgcatattcattagatgcttttaaaggactcggtcaaatgtacgtcgctgatgagcgcttcacgaaaaatatcgataagtttggtgaggggttagcgcaatttatgtgtgatgcgatggaggtttatgcgaatcgtaataaaaaataaaaagtaaaacaggtggagattttctccacctgttttactttttaatcatatcattcaaagtctgatctcccgtattgttcaaatgaggatttttactcatttcacgttttagcatatcgaggctttgcgtatattctgtatcatttaatgcgccagattgaagaccttgaatttgggaaatcaacttttggtctgttgatacatatcctttataatagcgagggacgatggacaaagcagctctatatacttgatccgctacgagttttggatccgttgtgtttgcacggtatacaacaaatacttcatcatcggtaacgagcgtagcagcgtttgtaacgtcaggaagtttgactgtcatgcttgtaatcatttcagcgactttctcacggttaatggcccctacttgtttgttagacacttcatgcttttgtttagatgaataaccgactctcgttaatcgtgtatttgtattttccgtatgatacatgtcgtttttgttggaaacaagaacacggcttccttcttcacgttccatttcggctttattcgttgattggcagcctgcaaataaggaaagagtgaggagagagagtataatttgttttttcacgatgtatcacctccttctccatagcatgcactaattttcaattttttgtatttgaaattgttggttgttatgctttgtgatacgataaaaagaagaatgcttagagaggaagttaatgatggagcaaaagcaagagattcatgctacggtgagcattaataatgtgcagtacgaagtaattaaaaactttcgtgacggttttagtgaagaagcatttaaagagcgctatgcagaaattttaaataaatatgattatatcgttggagactggggatatgagcaacttagactgcgcggattctttgatgatagtaaccagcgtgcgacatatgatacgaaaattagtacgttaacggagtatttatacgagtactgtaacttcggttgcgcacattttgtattacgaaaagtgaagaagtaaaaaaactcttacgattgtaagagttttttttcgtagcagttataccaattgtgaggaggctgtttacttgaaaaataaacagcacctcgacaaatataatgattcttttcatacaagcgcaatgaaacgggattgccagtgaaagcatctaatcgtatgcccgtatagtcttttcgttttgcttcattttcccaaaaggataaaagtactttgctatatccttttccttgggcgaaaggatggatgacgaaagaatggacgataagaaagcgaccgtgtgtttctgaccaatcaattagctcatattctggagattgccactcattcaacacaacagcaccaacgagcgaatcatgctcaaataggcagtagagttcaccttgttctaagtgataggcaatatgttctcgagtcggatatgaatcatcccattgataaattttcttttgtaagagcgcttttttacattctgtatacattgcatctaattcgtctaataaattcatcgtaccttttctcacatttagcatgagactcccccttataaacaaattgaaatagaatctccttcagatagtattgtatttggcttcatttgttgtccattcaattgaatatccccatttttaattttatccacaatgagtgtacggctccagtcggaaatatatgtggataaggctttatcgatgcggtgggaaccgaaaacgatgtctaatacgatcgtgattttagctatgccgttttctttatgttgcataatggaaatagtagtagttgtttcggcttgatcttgctgcgtcatatcgactgtttcaacgtgatcagtaaatgatttataaatacgcagtttttgattccacgtatgatctttcggacatttataaatggcaaagcggtatatgttttttccgttggcgttatgcctacgaatattcgtgtcagtaaataaggtagtgcgtctgcaatttttacaatacttttcgattgtgttttgctcattttcatataaactccaagaaagttgtactttctgcatttttcttcacctcttatagtagtggcaaagaaacgtaatacagctatttggatgtcttgtagtatgaagacatgagaaaaagacaaaaataaaaggaggttcccttaggaacctccgtaaacatcatactacagatgcgttacgttcctttgtaatgggaatgggcagactactcccttgaaaaagcgtggtgcttttttgagagtaatgctatccaattgctggtccattacaaagtaaatgttggcatacgtagataacgtcctttctatccaaatagatttattcttaattataacatattagtttgaaaattaaaaataattacaataaaaaaacaccagctaaaatagctggtgcatacgataaattatataagttcaaataaaaatgagcgtaattcttctgcaatttcttcagtcatagaaaatgcgtgctctaagtagcctggttcgtttaaatcgtcagcaccgatgattgcaaatttattgcgttgcatatcaaggacaattgttttaccgtaatgacgatcggagtataatagcgctaaatcgtgacgctcattttctcccataaagctaacgaaacgagtttttgtagcgacagtatcgtcgtacagaaagaaacgttcttccatacacatggctcctttattaaatatctaagtttaagtgtggtttatgatctaaatggtgatgcgttttaatgaatcgtactgttcttgttttgtaacgcattacgatagagtatgtttcagctaaatctccaccaaggaatttaacaccgtctaataactcaccagcagatacaccagttgctgagaagattgcatcatccccagatactaagtcatctaacataagaagttgacgaggatcttctaatcccatttcacgacaacgagcttcttcttcttcgttcattggaactaaacgagcttgcatttcaccttcaaggcattttaatgctgctgcagaaataacaccttctggagctccgccaatacctacgaataagtcgatacccgttccaggtagtgctgttgcgattgacgcaccaacatcaccgtcaccaaataattttacgcgtgcaccttttgcacgaacacggtcaataatatcttgatgacgttcacgttcttgaacgataactgttagatcgcgaatctttttattgttagcttctgctacaatttcaattgttttttcaattggatcatctaagctaattttaccagctgcttttggaccaaccgcgattttttccatgtacatatcaggagcatgaagaaggttccctttgtctgcgattgcaataactgccattgcatttgcaagaccttttgcaacgatgtttgtaccttctaatggatcaacggcgatgtctacttctggaccgttacctgttcctagttcttcaccaatatacaacatcggtgcttcatcaagttctccttcaccaattacaactgtacctgccatgtttactgaatcgaacatatcacgcattgctgtagttgctgcatcatctgcttcatttttctttccgcggcccatccactgtgcggatgctaaggctgctgcttctgttacacggacaatttctagtgcgagttcacgttccaagattccattcctccaatttcaaaaatcatacaaatataactataacaaataacggagaaaaggtgaattcgaaaaattgtcgattttttcagaagaaagcgttacaattaaaatgtaaatgctttaatttccaggtaggtgacattcatgtattttgtagacagaaagaaaatagaacaaatgctagtatgtttagaacgagcaacaagtacatttcaagagaaaaagatatatgaaaccgagtttgaattttacgcattagagcgcatagcccatcttattattgattgtgtattagatgccgggaatgcgatgattgatggatttattatgcgcgatccaggaagctatgaagatattattgatattttaatggacgagcgagtgataagtgaagaagatggacaagggatgaaagaaattatccttcttcgaaaaatgcttacgcaagactatattcaaatgaatcatgatgaattatataagacgattcaaaaacatattgcagtggtagagaaatacccagcaaatattcgcagttatttagaaaaggaattaggacctgtatctgcatttgtaccagaataattatgcttataagatccccagagaatgccttttggggatcttatattgtatgtgagaaagaaaagggagaagggtgaagtatgggggaagcacgtacgacgaaagacgaaattgtacaattgttgaaagtaaagggagagcacacggtagctgaactagctgacgttttagagattacagaaatggcgatccgaagacatttaagtaatcttgagaaagacggactcatttattctaagatggtaaggcaacatgtcggaagaccaacttatttgtatggattaagtgaaaagggagaagatacattcccgaaagagtataagcaatttgcgattgatatgctagaagatttagctcgaatgggtgatgaaaaaatacttcgttacgttttaaaagagagaacgaagcgaatggaagaacagttacaaaagagagtgagtaatcaaaagaatttagcatataaagtgcaagagatagcagctatgcaagagaaaaacggttatatggttcaaataaagagagatggagagaattctttcgtaattgaaaaacaaaactgtccgttaaaggaaattgcagagagattcccgcaagtatgtaaagatgaaaaagagatgtataagcgtttatttgcaggagcagatgtaaagacgttagcaaatatgtgtgagggcgattgtagttgttcttaccaagtaaaagagaaaaaatgaacgttatggggcgcttttaggtaaagcgtttttttctttggaaaaagcgggtaatataagagtggtatgataaggtgagaacgttagcatagaaggagagacataatcgatgtataaaggttacttaattgacttagacggtacgatgtatcgcggggaagaacaaattgaagaggcaagcgacttcgtaaaagcattaggagagcgcggcattccttatttattcgttacgaataactcaacgcgtaaaccagaacaagtggcagaaaaacttgttcgtttcgatattccagcgaaagcagagcaagtattcacaacgagtatggcgactgcgaacttcatttatgaacgtaaacaagacgcaactgtatatatgattggtgaagaaggcttgcatgatgcacttgtggaaaaaggatttgaacttgcggatgaaaatcctgatttcgttgttgttggtttagatcgtgacatcacatatgaaaaattagcaaaagcgtgtcttgctgtgcgtaacggcgcaacgtttatttctacaaatggggacattgccattccaactgagcgcggattattaccaggtaacggttcattaacatcagttgtagcagtatcgacaggtgtggatccaatctttatcggaaaaccagaatcaatcattatggaacaagctttaaaagtgcttggcatagaaaaaaatgaagcattaatggttggggataactacgatacagacattttagcgggagtaaatgctggcatgcatacccttcttgtccacactggagtcacaactgtggagaagttaacagaatatgaagtacaaccaacgcaagttgtgcataacttgacggagtggattgagaagatgtaatgaagaaagctgttccaaactttggaacagctttttttctaatatttgcgggcagcccgattggtgtgggctaacattcagttgtgactagtgtcgatttttgtcggtaagtcgatatatttgaaaaatcgccgatataatatgagttgcgccgatatatttagaaaatcgctgatataatatgagttgcgctgatatatttagaaaatcgctgatataatatgagttgcgctgatatatttagaaaatcgctgatataatatgagttgcgctgatatatttagaaaatcgctgatataatatgagttgcgctgatatatttagaaaatcgctgatataatatgagttgcgctgatatatttagaaaatcactgatataattttattaaaaagcacgattcacaacgtctttaacctcttcaagatattgtttacgcacactgtcatccacagaaggaacacttgtatagaatgtatgctcaattgtttcaatgcctgtaaattcaaaaataccaacatccgctgttttcttcatcgcatcaaacatgccgcctgctgtgtatgcttctttcgtattgcccattgtagataataacaatccttttttaccgcttaataacttttcaataccgttttcaccgtaagcataagcaaatccatggctaaacacacggtcaacgtatccttttaaaatagcaggaagtcccgcccaccaaactggataaataaatgtaatgctatcagcccaagagatatgctcttgttcttctttaatatcttctggtgtatttcctttagaaaatgagatgaaatcggaagcgcctaatactggattaaagtttaattcgtatagatcgcgaacgcgtacttcgtgaccttttccttctaattcactttttaccgtttctaaaatcgcatggttgaagctttctgtattcgggtgtgcataaacgattacatgtttcatttttcttcctcctatttgtggatatgtgaatagttatttgtatatctgtaactattatggttactgtttttgtagaagtcaagtaatacatatgtatgtataaaaagacgcccgaaaatcgcctttttataccccgctcatacaaagtacaaagaagacaaataaaataatgacaagcccgatgccgaaattaaatacgagagtgctatccatatatgtagcctccttgtttgaaagtaaaaagcactctagttaagagtgcttttttattttgaatctactttataacttttagaaagtgattcatgcgtgtaatgatttacattattttatgtatttatactttgaaatgagtaagtccttgttggatatagaaaaaaagacactcgttggagtgtcttttaagatgacaaaatgtgccaattgcttgaggttgataagacgctaatttccgtgttaacgccttttctttaatcaagaagtgtagcaacagcgattcaaataaattgtaccacttgtttaattatggtgcgtatgcaattgtgcatattatgatcatggggtaggtaatgaactgtgaataatttgaagtgatttatttacgatttcttctgcagcatatatgccaattgcgtctgtttttaaaatatggggttgtaagttatcatgcattgcccctaactcaccatgaagtggtgcgaaggcatggttcgccttttcaagcatgcataaatcaagtaaagaatccccagctgtaataatcgtatctatttgcaaaatttcttttatatattgcacagcgtcccatttgttaattggttttggtacaaagtatagctttctaccttgaagtgaatgattccagccttgtttgtctaaccaggaagtgaaagatgataattcatcataaggaatgttctcccgtttaataatgcaataatggaatagatcatcggctgttttttgtgatataacccaatctttatgagctatttgtccaaattcctttagtatgtcgtttctctctatacattcaaccgatagtctttcttttactgtcctgttccaagtaccatcttgtttcccgttatgaaggatattaccgccattacttgtaatggcgtattcgggaatgatttcgtcttggaataaagcaatccgctgaaactgctcaatagttcttgttgtaactgggatgaaatgtgagtgcagttgtaatttttttagtagtgaaatggttttatgtgatataaaagaaatttctttcccatctaaagtttcaatgagttgaattgattcatcttctataggggcacgaaacgatttccgggaataaataagcgtctgatcaagatcactggcgaaaatcatatcgttttcctcctaaggggcttaatgagcccgcaacatgaataagccatattctcatagatttcaatagagacattcttttctttagcaagaagtaaaatatgctttaaatcgggattgttttgcttacgtattaaaattttccacggtattctccggagtaatacgcgagttgtttcaccgactcctggtttaattaagttaatatcgtcaatttcaaagtgattttggatagactgtatatcttttaatccttgccaagagggatcagtgtaagttgaagtaatataacgtaattgattatctatatgagaatgaacagaagggaataaatctgttacctcatcaacgaagaaatttgataagtcttcttgctctagctctttataatatttaacaccatgaaaatcatttggaccgatataggtgtcatttagtacagtgcggctaatgagtccagagactgttgcatttaagcaagcgctaggaataagaaaatcttcacgtgtaccgtaaattgaagtacagtaaccgggatcagcaagcacagccatacaatgagaaatgtgtgtattatttcgttcgttaaatgtgtgtactgcatattctaattctttttttattgcaccttttccagtccacccatcaatgaattgaattgtttctttagggtgatgttccaaaatataatggagtgcattttcatcaataccgcgtccgcgaacaatagaaatacaatagtgaggtacatcaaggttgtattgatagcgtatgtagcgtttgataagaatgccaataggtgtaccagcacgagctaatgaaacgaggacaaggttagttcctttagtttgtataatctgttcggcgacaactccaacagcgatggctagtttgtgtttgtattgttgcagggaagaaaagaataaatccatatacgctttagagggtttatattccattggtaacatttcggaataatgtgtgccagcttgaattgcttgttctctagtttccgtggaactttctttcattaaatcactaatatcttttaatagaaaaatagcatcatttggattgtaactactaatatgagaatttacttttaccataattatcaaccttccttttctatgctatttgaaaatgagacgatatgaataaaaggaataactgtttgtaactgctgtagaagaggagatagggcttcttcccctaaatcacgctcaatgaaaacaaatacttcatcgtaatcatgaggtgaaatattataaaagtaatttgtaatagtagaatcttcaggacttggatatgagaaatgattatgaatggcgtagttcacatcatttgaaacagaatggatagggcttcttgttgtagattgatataaaatattttcacccatttcagcagcaattttcattgggatatacataaattcacccgttccgagacagagtgttcgttttccaattctttctctttttaaagtttttcctgcttcttgggcgaaagaatgaatgtgcttttgttcatatgctgaaatgccaaatcgcccagtatattttatataatttgatgtatagggtgattttaggcaggtaagggtatgttttttgaaatcaggttttgtttcttcaatttgaatctctttttttgcaatatttaatggttggccagttgtatgaatactgccttctaataaagaaataacatgaaccttaatttgaagttcttcttctaattgtttaaattgttttctattagtatgagaacgccagtctaacaaagaagcaattatatattcttctcgtgggaatttattttgaatagatctaataatatttaatgctgtttttcctgttgtcatctcatcatctacgagaacaattggattgttgttttgaaaaaagctttcatctacataacaacggtgtgatgttgcatgagaatgttcttcctcaaatgtaatgacagattctaggtggggtatcgattccctagttgtatgtacatactttgcattttgaaagcattgaaacatagaatgaccaagtgatgtcgctgtttcagcgaatccgatgaacaaaacttcttcttgcagaggatattgataacgaaatacttcctctgggatttcatcaatttctaatgaaatgagatttaaaatttctttttgaaatggatgagaaatattatgtagtatttccatatatcttgcagcgagagcaactccacttgatagagagactgcaggtttaataggaagatgctttccaaggattgtactcacaaataaaaaactacgtttcttatttattctcgcagccatttgaaaaagattgtctagcgctaaattatatggattatcacgtacttctacatgaacttgtatattatttaaaacgttatacgtgttgctttgcgtttgtaataaggagatcggtgaattgtttgttttcatgtagcaccccgtaaatattagattttaaaatggttttgcgagcccagccataatgaggttttacttcattcattttgttagaaaaactgctttttagcactccattatacgtatctgcattttgtaaaattaatctcgcatctaaataatcttccattgtgacaatgtgcattgcctgtacaactttaatatgagatgggtgaataactgtctttccgattaagccatttgcatggtcaagtgatacctcttgaataagcccttcttcatgatcattagaaaaatattcccatacacatcctgaaataatatattcatttgttgcccttgagaaaacgttaataatgtctgaaatacaatcacggacaacagtaatatgatagataggtgtgtatttattgcgccgaatactaaatatacttgaaaaatcagtagcaccaatacgtacatttaagatgtaatcgtgataagaatctagtaaatcctttatttgtaataatgattctgcccgtgtttccttatacataatttcgggtgattctaaaatcggcatgccatatagcgataatgagtataactcgtttatatatgcaagctgatcgatataagtctttccgttaatcggtgtgaattttggaaagacaaaaccacataaacaatgaacagcactacctaattcagtaacaattttcttcatttgacttggctgtcgaactctaataaaaagaagtgggatgtctgcttgatttagtatgttggcactgactaagttagcgatttgctgtatttgaacgacgatgttttgctctgcaagttttacttcctcatcgcttatagcgtcctctagacaaagaataattgagatagcatccacatgtttccttctaattatatcttccgcaatcgtttctttcgtgccaggagtatatagtgtagcgcctagtgcgtaagctagttgttcttttcctatattttttgaaaaactaagaggttctttatagaaaaaattttgccgttcttctgaggagagataagaaaagtaattcaaattgtcaccaccttatttataatgattctgtttaatcgtaacataataagaaaaatcttccataaaaattaagcaagaaattaaaaaaatatattgagaaagatgaattataagatgaatatcgaatattgttaatagaaatataatagggggaaagagaaagtggatatacataaattaacagaggaagaagcaaatgagataaatacttggacgtacgaggaaccatataatttatatagtttttcaggcgagaaagaagtaatggaagagctattagatggaacgtattatggctgttgtgatgatcaaggagacctcatcggttatttttgttttggagcaaatgcacaagtaccaggtggaagagatgctcatttatatggtggaagagatgctcatttatatggtggaagagatgctcatttatatggtggagaagatgtgattgatattggacttggcatgaagccggcgttaaccgggaaaggaatggggaaagaattcttccaagctggaatagcgtttgccacgaaagagtttaatgcaaaaatgtttcgattaagcgtagcgacatttaatacaagagcgattacgttatataaaaatatcggatttaagcaagggcctatttttttgagtcgcggaagagaatttatgctgatggaatatgaaagaccgtcagcatgaacctgacggcctagaaaacactattattctgagtgctcagctcggtgcgctaaacggcttgaagcagcggcagcgattccgccaacgatatcatcaaggaacgtgtgcacctttccagttgatttatcatttaagtattctaaaataccaggttttaatttatcaatatatccaaagttcgtgaaaccgatagagccgtacacattcacgatagaaagtgcgataacttcatcaattccgtataagccttcatcacgttttacaatatcttgtaacggttcacttagcattcccttttcagcaaggacatcaagctcgataccagtaatcagtgcgttttgtacttcacgttttgatagtacacgttctacattgtaacggcattctgacatctctaaatttggatgatattttttttgaagaaaatgaacaagttcagcaatatcgtcaattgttacaccgcgttcttgtaatagttttaatgctctttcttgtagttgatttgattctttcatgtttatcacctttttttctttttagtatttgtatacgtttcgttgctttatcatgtgcataggaatgaaaggcgagcacaagctcatatatataaagaaaaaccataggtggcgactgcgatgattcagcatatttatgagcattatcacatgcatgttaaagaattaatcccccttggcccctataaaagcttttggattcgcaacaaaatttatgtacttgttccaattggagaaatggaggaagaagtacttgtagagatgaaaaagctcagtgattatatgaaccagcaaggggatataactgtagcgactttcgttccgactatacacggctactatgtaagtgagatagaagaacaaaattattgcttattaaaaggtatgcgcacgttagaacgacatgctatgtcattaggaagtgagctttctatattccataaacgaggtgcattctttccagaagaaattgagcaattaagccgaattggtgaatggaaagcgttatgggaaaaaaggctcgatcaattagaaaagttttggcaatcacaagtgatgaaccacccttcagatgtattcgatcaattgtttattgaatccttcccgtattacttaggagttgcagaaaatgccattcaatatgttgtcgatacagaaatggatgatacgccgcaactaacggatgcagcaacaatttgccaagaacgattcacacctttattatggcatcaaacgaagcgtctcaaacttccttttgattgggtgtatgatcacccgagtcgagatattgcagaatggatccgccatatgacgatagaaaaaaagaaagactgggagcaaacaatcgttcaatttgttacggattatgaacggaattattcgctatcctcatttggctggcgcttattatttgcaaggctcctgttcccgctgcactattttgaaacggtcgaacgatattaccaaactggaaacgaagaacaaaaaagcatatatagagatcgcttagaagccattttacacgatgtgaaccgctcagagcaatttatgaagcatttttatggttcgcttcgtttaccagtagataagcttgggattagaaaattagattggttatcttaaaaatataaaaaagagaccgagtgaggtctcttttttatataccacaattttatgtaatacattatgcccctacctgctgatctgtacatatatttaaaacgaattgatgcttttcgagcttttcatttactttacccaataattcttgctggatttctttaaataaaaattgatagcttgtattccacgttggtatagcggatgaaaggcctaataaatactcttttttcttttctagttcttgaattgttaaaaaagtgttccccatttttggcatgtgtcgtccccctatgttttttactttatatgtgtgaacgattcactatatagtattaattatcgcattttttgagagggatttccaattttgttttatgatgttaacggataaatgtgatttgaataaaaaaaggagaccaaatttggtctccttttagcaagtgactttgaacgagccgcttccgcttttaattaaaatacttgttctacttcgataacgcctggtacttcttcaagtaacgcgcgctcgataccagcttttagtgtgattgtagaacttgggcagcttccgcatgcacccataaggcgtagttttacgataccttcttcaatgtctactaattcaacgtctccgccatcgcgaagtaagaatggacgtaatttatctaatacttctaatacttgttcttgcatatgtgggttttccatttttatcgactcctttcatcagttttattataatcaagatagaggggaaaatctattttttctcttcttgttttattgtcgaaattttgtatcgtgttttttcagtataggggtatggaataagtttgtaaaatgatgtgcttatgtaataagacatctgaatatactgttgggacaagaagtgggggagaagaaatggttaatgttcaagtgtatgggacgaaagtaatttgtgcgagctgcgttggaatgccatcttcaacagaaacgtttgagtggttacaagcggcaattggtcgtaaatatgaaggacaagaaaataaatttaatttcgagtatattgatttccaagaagaacaagaagatgcggataaaaaagcattcgcagagcgcgtagtggaagaagatttattttatccggtcgttcttgtaaatggagaaattgttggagaaggaaatcctcgtttgaaggatgtttacgaagaaatcgagaaatatttataaaacaagaagtctttgcgaatttgcaaaggctttttttattggagggatagatatgaaaaatggagtgaagcatgcgttaccaacggaagtagagcagttaatggagcggtacacagtagaattaaaagaaatttttttggatgaaaaaatagtcggggtatatatttacggatccatcgcactaggtgcatttcataaggaaacgagcgatgttgattttgttacagtgataaatgattccgtgaatgaagctgaaaaacagcagcttgtggaactacataagaaacttagtgataatatgctaggtaaaagaatggacggtatgtatattccgcttgctgacttagggaaatacaatgatgaaatgaacgagtatgtgtattgtgcagatggtaaagctaatgttggtcattgggacattaatgcggtcacatggtggacgttgaaaaatcaaggcattacagttaccggaaaagaagcagaagatcttccgctgcaaatacaatggaatgatgtagtaaatacgatgaaatacaacgtagaacagtactggagtgggaaggcgaagaagccatatttattctttatagaagaatgggtagaatcagcggttgttacgatggggcgtattttatatacactagaccataaaacaatcgtttcaaaagatagaggactacaatacttgttagaacattcatcggaagaatggggacctttattaaaagaagtagagagaatacggcagaatccaaaagaaaagcgaatgctctcaaggtggagaagggcagatatgacgaagaggtacttactacatttaattgagatgtgtagagagaaatggtagggaagaaaatggacaatacagtggggtgtattgtcttttttattttgtagtagatagaaaagtatttacaagtattgtgtagaggaaagataatagaaaaaatatgtgcatgggggaagatgatgagtaaatataaattacatatagatagagaacaattatggaaaggatgcgttttaaattcgattgcccatgcaattaatgtagcgcattgtccagatttctcacatgaaagttcatgggatggatttaactatagtatgcaagatagccaaggcggacaaggggtaattacgtttcatccgaattatacgattgtatgtcttcaagatgtgaatagtgagagaatggatgagtggattgatgcgaaaagttattttgaaggggcaccttcggaagtaatagatattgcgaaagaagaagcacttcaatacgtattagaagaagtagaaggcgaaacagttccttttattacaactgcattttggattgaggatagtggtgcgtattcaattgattcatttgaagagatggaagagcacggtggattcttattagaaattccattacttgatacagaatcagcaatggaaagactggaagaagagtatgaactgacagaggaacaaatagagcttttacaactcgtgtatgagaaaaaaatccaaaggccaaatgaggaaattaagttgtctaaagaagaagtagcaatgattggaacggaagatagcgaaggattggaagctaataaggagtcatttgcagaaatgaatattacttgggagttgtaggataggatataaaattgtgataaaggactagtagaaagaacaatgtgaaattacattgcactttctactagttttttcatatacatatcaacttcgtgaaagaatatgggctctttttccttagtattcagatgcacggtgcaatgtaaatattgctgtaagtagcgattagcttgttcgtactgttttaatttgtagaaagaaaaacaagtaagaagtagaaacgctttttcttctaatattggaacgacagctagtaccggagtaatggaatgtatatttatttccactaaattttcataagatgtccacgtttgaaaccagtcgaaaatagtagaaaggtaacccggaatgttgatagtttcatgtgaaacattatgcaatagctggttctgtttgatatgtataggctctattctcgtttgtagaatgcaatcgaatattgaaatgttttcttttatttgtaattggtgcgtaataagctgcgggagaccgatagggtggactcctatatttatataaaagtcatctccaaactggcttttttgtatgttaatgagcttataaaatccgttttcagctttgaaaaatgtatgtctttttgtcttaaagccgagtggttttaaagtggcgtgtaaatttgtaataaaatcttgctcctttttagagccaggcttattcttcgtcatattcataagtagttaagttttgtaagaaactttcaaagttaggtgctaattcaataatttcctcaaactcattatcgataaatataactggaggattttcagctacatttcgatagtctaatgcaatccatgtatgtccatcaccagataaaagtatgatattctcaggcatttcccattctcgaattaaatagcggctctctaaaatactagattcattttcatcaaaagaaataccatataaaccagatacattaacgtgatcgtctgcccaagaatttggctttgaagtagggtgaacatcgagacgaagagttcccccattttgttcttttagaaggtttatatatgattctggaagctttacgttcagtacttcttctgcttttttgattagttcatcgttaatgggtgctagttttaaatagtcatcgtctgcccaaattgtactcttcatattcgatcacctcaaataatagttttaagaatcttatgtcatatattatagttagtttagataacatgcaatagagggagggacggagtatggatgtgtatgaatacctcgatcacgtaaattctaaagaagatttattaaaatttcttgtatacctccaaaaggattttaaagtgaatagagatgaatgggagaatgtagaggtagagacttatttagaggcattaaatagttggttaggttcttgtgaatcggtttatataaatcaaggagagaagtttccagaaaatatttcatggaagtttattgctcaaatgttacttgcggcagctcattatgaataaaattagatttttaaaagatagaatggagaagatatcttgattaaccataataaaattaaacaacttttagcacatgtagatcgtgctgatgataatgaaattgagctagagtatgaatctgaacctatgacgatagaattgtttaatagtgaagaaatagaagaagggcaacttggttatagttttgatgaagaaggtcaaagcttagtcgggaatgaagaaggagattggaaagaaggatggattgtaatagggatagattcatatcttggagacccgatttttgtagatagtaacgatgagaactgtccagtttatacagctatgcacggtgagggagaatgggagccggaatgtatagcggagcgtatagaagatattattgagaaagtgaaggggaatgtgcgagaaataaaatagtatttcaatgtgattaagagggaggaaatgtagtatatattcactaaaaaagatgtataaaaatgattttgatgcatcctttttagtgaatatataaaataattaacttagtgtattaaatatatgatacatgattattttaatatatttaaaagtaaaatgaaataagaaacggataattgtcggaatatattcgatttccgttcatttttatgaaatatgtgtactttttgttagattccttcattttgtgcatatacaataaatgtatatagaaataagaaaaggatgatgtacgtgaaggacactgttttacaagaaacgatttctccacaagaattacataaagttgttcaaaagaatacagcttattatgactttaagtgggggaaagtagaaaatccagcgcaagggaatacatggaattgggtagcctttttcttcccaactttttggttagcttatcgaaaaatgtataagttatttattatatttgcgttattggctatacctagtatatttatacccccttttatagatattccagatgggatttatgtaacatttagtttagctcttcaattaggaatgatgatatttactggatggcaaggaaaccgtttatattataagcatgctgttcgtgtttttcgtaagggagaagattcgtctgatcatgagaaggcgtatttcttacaatcaaagggtggcgtaagtattgctggtatgattggtttacaggttatagtcgggattgtgtttgggttagctgcgctcgggctgtcctttttaccaactgaaccgaatattaaaaacgttgttcgttcaagtggtgaaggggttactttagagattatgactgataatccaacttggaagtttgttaagaaagaaaaagattatgacgtagtagagtttactggttatgattatacagagaagaaaaacgtgaaaattaaatttgctgtttatttcgatgaagattatttcgagtggcaagaggtatatgaaaataataagaagttaagtgaagaagaagtggaagaatatcaaatttacattgaagaaaataatttgggtttctagagagaactcgttcattttgaaaagaagaatcttgtgaaggttcttcttttgtttattagggggagagaaatgatttcagcattaatagaagctctaataggatctattagtttaagtacgggtttacacacgaaaaagattgatgttaacatacgttacttgcagcagtatgaatggtttcgaatgatatatgaagacgagaagtatcaaaagttatttattacgaactacaaagttcgctcatatttacaaagtaagctaagagttcgattgctcgtaaaaaataaaaatgcacaacgaagatttttaaaattagtagaagagcaaatagaaaaacggcatacaaattgaaattttgtaaaatacaataaaaaatgagaatttgaggtagggttgtcaataacgtgagactatggcactataaagaaatgctatacaaattttatttatcgagatgtaaacatcaattttgatttttacgtataaataatgaacggaggaaatgaatttatggctactttaccaaattgtccaaaatgtaattcagaatatacgtatgaggatggcgttcttttcgtatgtccagaatgtgctcatgagtggggccaagaagcagaagctgaaaataatgatggtgcaaaagttgtaaaagatgcgaacggaaacgttcttcaagatggcgatgctgttactgttattaaagatttaaaagtaaaaggaacttcttcagttgtgaagatcggtacgaaagtaaagagtatccgtctagttgatggcgatcacgatatcgattgcaaaatcgacggtttcggagctatgaagttaaaatcacagttcgttaagaaggcgtaagtaaatagaagaggaggcgaatagccccctctttttattatgtcactttttgtcggtaaatcgatatttcgtacaaaatcgttgatatattctgagttatgatagatatatttgcaaaatcgttgatatattgcaagttatgatagatatattgaaaaaatcgttaatataatttcactcaccgagaacgatgcatcatttactgagcgaaagttacgatttacctcgcatcatagtcaacctctttcaactgacatcgcttattaaagaacgttttatatccaagctgtaaaaagataatgacagcaaaggcagtacttccagaaataccgagtatgatggcgatttgatattgaatggctgtgaatggtgatacaccggataatatttgaccagtcatcatgcctggtaagcttataattcccattccgaccatagaattaattgttggtaaaatagcagagtcaaaagcgtctcgaatgagcggagcagctgcttctttcggtgttgcgccgagcataagtgcaccttcaatttgacctctttgcgatttcatattgtttaagaacgtatttgcaccaagagaaacaccagtcatggcattcccaactaacattcctgtaatagggacgatatattgcggagcataccaagggtcatgaccgataataacaaagataaatagtagaagtggtccaattgatccggcgatcatggaaagggcggctactcgttttaattctttagacattgggatgttaacccgtttataaatattaaaaattgcaaaggtagtaatagaagtgatgagagcgattgtataaaatggattactgttttcaaatacgtatgtaaggacatatgcaacaagtacgagctgaatcgtcatacggaatgttgcgagcgcgatttgtttttcgcgaggtattccttttaattttacaagtccaattaaaataagaatgaaaatataggcagctgcaagttgccaaatttggagttcaataacgcccttcaactgagagcacttcctttctagttgcaccctttgttttgctaatttcaataatatcgtctgcaatttcttctggaagttgttgcgagtgtgtgatgaagataactgtttttttcttttttcgtgctagttcagtaaattgtttcataacgcggcgttctgtatcactgtctaatgctgaagtgggttcatctaataaatagacaggcggatccataagtacgatacgtgcaaaggcaagtctttgtttttcaccgccggataatgaggaggtgctatcttctaattgcttgtctaagctaacggtttgtaatgcactccgcagggcatcatcatttggaaatggtttttcagaaagacgaagtcccattaataggttgtctttaacggttccatcaaaaataggtggagtttgcccaagcataactacgtcacgacgtaattgaatagggtaataatcagaaattaactttccgttatattcaattgtaccggatgttggggattgtaaatcatttaacatgcgaagtaatgtgctttttccgcttccgctttcaccgataatacaagtaatcttttctttttgaatctgtaaataaggaatgtgtagtatatctttatatataacgtcttttaatataaacataaatcgctcctttctgattctagttatatcgtatcaaaaaaagaggggaaaatggttataacgaacaacgttttttcttcgtcttgagttttattaataagttaagtaaacgatctaattcttggctgaaagaaatcactttatcatgagtgaatccgtatcgttcaacgagatagattagctctttctttttcgcttctattcgattgtttagtttcgataagttcataagtggaatgtaatgcctcctacaaaagtatttatcacatgaaaaataagaccgaatgaactcggtcttaaaggaagtaataaaacaacttacaaatagcatacaatgtttatcaatattttttaatataaaaatgaaaaataaatcattataaatattgagaaagatgtgtctgataatttttaaaaactgatgcaaagaggctgcctacatagtagacagcctgtaaagtattaacctttatgatatttgtacatccaaagaagaccagattttaataatctcggtacacgtcccattaatggttggtttgctagtaaaccaaagccgtgcttcttaccaagagatcctagaacaccttttaatttaataacaggtagttcatccgggagtggttcattattccaacgttttaataatatttggacaatttgttctccttgaccttcagccagttgggcagatggtgcatgtggaagtgctgcgcaatctcctacaacgtaaacatgatcgttatttggaatattatgatatttagttaagacaacccgtccgctaccatcttgttcaactggaaggtttcgaacaacttcatttgcttgaataccagctgtccagacgattgcatcacattcaagtggttcatcgtggttgtacacaatatttggttctacttttgtaatgttagagtttcgtataatgttaactttatgctttacaaaccattcttctacgtatctacttaatttctctggatatgggaataaaattctatcttttcgatcaaataaatagatttttaaatcagaacggctttcacgaagttcacttgctacttcaacgccacttaagccagcaccaacgacagctactgttgcatttggttctagactatttaattgttcatatgtcttacgtgtttgttcaattgattgtagactatgtgtatattctctagctccaggaacgttatgatatttatcttcacagccaagtccgataattaaatcatcatattggatcgcttcgccgccatcaagatgaacagctttttcttcgaggtcaatatttgttactgtgccgtattgaatattgaggcgtgggtgttcaggaaacggtatacgaatatgcgtttctgaaatagtacccgcaactaatgcataatattcagttttgaagcaatgatatggtactttgtcgattaatgtcacttgtacatcatctggaagttggttgcttggaagtagcctttgcagaattctcattccaccgtagcccccacctagtattacgaggtgtttcatgatggattaccccttttctgttgaaatatcccctaatcataaaattttatattaataaaatattttgactttactcaatcaaattatatcgaatttgtgaacaaataacaatgcatgaatgaatactctgttgtacaataagaagaaaagtaaactgtttttctttttaagttactctttcattgtaagtagcatgttatatagaagaaatcatctactttgaagtgaagtaatgaagtaactaaatagtttagactgtgtaacgaaaacaacaagaaacagcttagttttcttcttatagataaagtgaaaaggtaatttgttttgtagtacaggggggagaattttgattaaaccattaattgaattttgtgtaggtaaccttgcaagtggttcacaagcagctctagaaaaattagaaaaagatccgaatttagatgtaatggagtatggttgtttaggatattgtggcatttgttttgaaggaccatttgcacttgtaaatggtgaagttgtacaaggtgcaacagtagaagagcttgttaataatgtatatgagtatttggatgaaaatccaatgttttaaggtgttgcgaattagcagcacctttttcattagataaaactttatttcgtggggaagactaatactgagtattagtcttccccaatcgaaaatagtaggataaataaaaaaaggccctttttagaagggcttttttcttacacaaattgtgtaagagtggctcatcgccaaacgttgtcaaatatgagaaacgggggacattcatattgtgttctaaaagcatgcattttatacttaacataacaaattatttttggagtgaatataaatgagccaattttcttttacaaaaatgcatggtcttggcaatagttatatatatgtaaatatgtttgaagagcaaattcctgaagaagatttagcccttgtggccgaaaaggtttcaaatattaatactggtattggagcagacgggatgattttaatttgcccttcagacgtagctccggtgaagatgcgtatgtttaataatgatggttctgaaggaaagagctgtggtaacggtttacgctgcgtagcgaaatatgcgtatgagcataaactagtagaagaaacagttttcacaattgaaacgttagctggtattgtaacggctgaagtaacagtagaagatggtgtcgtgacattagcaaaaatcgatatgggagcacctcgtctaacacgtgcagaaataccaatgcttggtgaaggtgaaacaccatttattcgtgaaaacttcttatacaataatcatcgttatgcatttacagctgtttcaatgggaaatccgcatgcggttatttttgttgatgatgtagaaaaagcacctcttacaacacttggaccagttctcgagacacatgaaatgttcccagagcgagtaaatgttgagtttatcgaaattttgaataatgacgagatgaacttccgcgtttgggaacgtggatctggtgtaacgcaagcttgcggaacaggagcgtgcgctgcagttgtagctgctattttaaatggaaagatggaacgtggtaaggaaattacagtccatttagctggcggcgatttaatgattgcgtggactgaagaaggaaacgtgttgatgaaaggacctgcggaagtaatttgccgcggagtgtatgagtacaagatagaagcgtaaagatgtataatggactaagaacagaaaggaaggtgtatttcatgattgaagtaacagaacaagcagcttttcaaattaaagatatgttaaaagatgctgaagatggagagaagtatgtgcgccttgctgtacacggcggcggatgtagcggtctttcttacggcttaggatttgaagtagaaccaaaagaagacgacacagttcttgagtttttcggtgttgaatttgttatcgatacagaaagtgctccaattgttaaaggagtaaaaattgactataaacaatctatgcttggcggcggattcacaatcgacaatccaaacgcgatcgcatcatgcggatgtggatcatctttccgtacagcatcgaatgctggtaagccagaagagtgctaagtttttagccaaaatagaaaaggcctttttagcgatggaataaaattgaagtgacccccgaaagttagacaggtcgtttcattaggcagcctctagggtatgaataacgttttttgacacttgggggtagtgcaaattcttaagttgatgggcatggggtaggaacagattataacattttattatatacgaggtttaaagaagaattaagtaaacaagaaaatgcatttttagctacgaaagaaacattcaaatcagcaggtaaaactgtattatatagcggaatagcggtgctaattggttttgcatcacttgctttagcaagttttaaattatatcaatcgacttcagcggtagcaattggtgttttagtattattactcgtattaacgactttaaatccatttttcatggtgcttttaggaaaaggaatgttttatccagttaaaacatttaaaggtcatgaggatagtcgcttgtggggattctttgcgaaaaactcagtagcaaggccatttgtcgctttaatcatcgtattcgtaatatcgattcctttcgtattaaaatactctaatacacttaattacaatgatttatttgaagtggataataagtatgaatccaagatgggtattaacgtaatagaggatcattttccgcctggtttctcttcaccgagtacattagtcattcaatctgataaaaagctggatgaaggaacttctctacaaattttagacgaattaactgataaaatttcgaaagttaaaggtgtgtcagaagtatatgcaccaacacgtccaactggtgagaagataaaagaattatatttaaataagcaagcgggagaattgaatacaggattaggagatgccgatggtggcataaaggaaattaatgatggattaacagatgcgaaaaataaaatgggaagtaatgattcaaatagtcttgcgaatgttcaaaaattaattgatggaacgaacgaggtgaaaaacggggtatcagcattaggaacagctttacatcaattatcaaatggcataaacgacggtgcacaaggagcacagcaaattgagagtggtttagcttcagtaaacgaaaatataaatgttctatctaatgcaacgtcgcagctgcatgctggttatgcacagttagaaaaaggtttaaactcttacgatcaatacttcggaagtatttctcaagcgattgatggtgcgaaaaagggatatgaacaaattgaaatgttaatgaccaatttcgttcaaacgaaaccagaattagcgaatgatccaaacatacaacaaacgataggaattgctaaagaggctcaaaagaaattaagcgtactttcaaatgaattaaatcaattagcaacacagcacaaaacggcgatgagttcatttaaagaagcgaatcaatcgttactgaaagtggataacggcttaaaagaaatgagcaatggagttaataagttacaaaagggagcagccgatcttaaaaatggattaaatgaaggttcttcaggttcaaaacaaattgcaaataaatcagttgagttacaatctggattaacgaaaataaacgatgggcaaggacaacttttaacgggccttaaagacctgcaagaaaagatggggcaattacaatccggtttatctaaaagtacagaagggcttggaaaagtaagtaatggcctgcatgacgcacaaaaatatttaggggagctcaatgaatcgaagagctctgagaagttttatattccaaaagaagtgctagagggagaagatttccaaaaagcattgaacacgtacatgtcgcaggatagaaaaattgctaaaatgactatcattttagatgtaaatccgtattcaaaagaagcgatgccaattattcaagaaatcaataaaacaatcgatggcactgtaaagggaacggaattacatgatgcgaaaacagcaattggcggaacaacagctagaaacgttgatttaaaagaagtaacagggcaagatttcttacgtacagctacaattatgttaattggaattgcgattgtattaatcgtaattacacgctcattactaaacataatatttattattggctcattactattagcgtacttcgcatcactcggtataagcgaacaaattagtgcacatgtattacatgtagattcattaagctggaatgttccattctttagcttcattatgattgtcgctttaggagtggattatagtattttcgtaatgatgcgctataacgagatagaaggggattcggtaacgaaaattgtaactgcatctcgtcatataggaggagttgtattatcagctgcgctaattttaggcgggacatttgcagcattaattccatcaggtgtattaacacttatacaagttgcatcagtagttggcgttgcacttcttctattagctttaattgtgatgccgatattattaccggcgttaatagggttaacgagtaaaatgaagagttacaaagagaaaataataaatacgaaataagaagagactgtagggaatgatttctctacagttttttcggtatataatatttcagatgaaaatgaatccgatatattacagaatgagcagtgaaaggttatatgagaaagaggtcgatgatatacatacaatagctaggggaatggacaaaaactatccgatttcattgtagaaaggtaatcaaccgttgctattcatccatcttctactatataatagctatagtctacaataattgagtcgtaatatgcgatttcttaagacaatcggtgagaaaacgctgaaataagcggtattagtaggaggacacaaatgattacagtaagtaacgttagtttgcgtttcgcggatcgcaaattatttgaagatgttaacataaaatttacgccaggtaactgctacggtttaatcggagcgaacggtgctggtaaatcgacatttctaaagattttatctggagaaattgaaccatcaacaggtgacatacatattacgccaggtgagcgtctagcagtattaaaacagaaccacttcgaatatgaagagttcccagtattagaaacagtaattatgggtcacacgcaactttacaaagtaatgcaagagaaaaatgctatttacatgaaagaagactttagtgatgaagatggaatgcgcgctgctgaacttgaaggtgagttcgctgagcttaacggttgggaagctgagtcagaagctgcaattcttcttaaaggtttaggtattggtgaagaccttcatgataagaaattgtcagaattaactggggcagagaaagtaaaagtattacttgctcaagctttattcggtcaacctgacattctattattagatgagcctaccaaccacttggacttaaaagcgattcaatggttagaaaacttcttaatgaactttgaaaacacagttatcgtagtatcccatgaccgtcacttcttaaataaagtatgtacgcacatggctgaccttgatttcggtaaaattcaactttatgttggtaactatgacttctggtatgagtcaagccaattagctttaaaattaacacaagatgctaataagaaaaaagaagagaaagtaaaagagttacaaaacttcattgcacgctttagttcaaacgcttctaaagcgaaacaagcaacttctcgtaaaaaattattagacaaaattacattagatgatattagaccgtcatcacgtcgttacccattcgttggcttcacacctgagcgtgaagtaggaaatgacttattaactgttgaaggtctttctaaaacaattgatggtgaaaaagtgttagataatgtgtacttcactttaaataaaggtgataaagttgcatttatcggccgtaacgatattgcgatgacaacattatttaaaattcttatgggtgaaatggagccggatagcggttcattcaaatggggtgttacaacctctcaatcttacttcccaagagataactctaagtactttgagaacagtgattacaacttagttgaatggttacgtcaattctctccacaagatgagtctgaaagcttcttacgtggtttcttaggccgtatgttattctcaggtgaagaagttaagaagaacgtttctgtattatctggaggcgaaaaagttcgttgtatgttatctaaaatgatgttaagtggtgcgaacgtaatcacacttgacgatccaacgaaccacttagaccttgagtcaatcacagcattaaacaacggtttaattgcattcaaaggtacaatattattcacatctcatgaccatcagttcgtgcaaacaattgcaaaccgcattatcgaagtaacaccaaacggtgtaatcgataaagaggctacttatgatgagttcttagaaaatgaggaacttcaaaaacaagtagatgcaatgtacaaaggtcaataatatataatgaaaaaactcgttctttttagagcgagtttttttgtcgagaaaacgtaacatcgctggtcggtcaaatgaataattattcaaatataatattaatgaacaggagaattctttcatgtatggaagggatgtaatgactttaagatttaaagagttagttgaagaagggaaatgtaagtggagtaatataatcaaatcgtattattttgtcatgtgaaatatgtaccaaatttggagatagaatagtttgcgaatgagtttataaaggtatatagtatggggtgtcataattagtggatgaatcttgggagaaaacaggaaatgttacaaatttattttgttaaatagaaaccaaggtcaaaatgtctagaaagaaatagttgaataaatactagcttcaaattataattactaatattcttcatatagttaaataaagataatctatttgaagaagaaaatttgaatagagagacagacttataaaaaataagccttggatgatcaaaagaggtggagaaatgaaacagttcttattaaagagcaaaagtgtgttaagcaatcattttggattctttctgtttgccgttattttattgtggctcaaaacatatgcagcttatgtaacggaattcaatttaggaatttcaaacacaatccaaaaattcttgctgttttttaacccgcttagttcagcagttctatttttaggacttgcattatttgcaaaagggaaacgatcttatatttggttaattatcattaatttgttattgtcgattcttttatacgcaaacgtagtatactatcgctttttcagtgactttattacgttcccgacattaacacaaacgaataactttggagatttaggtggtagtattcttgcgttgctacatctttatgatccattatacttcttagacacgattatattaattgtgttagtcgcaacaaaatttgcaaatccaaaaccaattcgtgttgcgaagcataaattatctctagtatttgtagtaggtattttattattcagtgttaacttaggtcttgcagagtctgaccgtcctgaattattaacaagaacgtttgaccgtaattatattgtgaaatatttaggtgcatacaactacacaatttatgatggaattcaaagtgcgaaagcatcaacagaacgagcattagcggatggcgataatatgacagaagtacgaaattatttaacatcaacttatgcaagtccaaatcctgagtatttcggtaaaggaaagggaatgaacgtaatttacattcatttagagtcattccaaaacttcttaattgattacaaattaaatggtcaagaagttacaccgttcttaaactcatttacaaaagatgcgaatacactatactttgataacttcttccatcaaacaggacaagggaaaacatctgatgcggagtttatgttagagaattcaatgtttggcttaccgcaaggttctgtctttacaacgaaatctcataatacgtatcaatcagcaccagctattttaggacaacaaggatacacatcagcagtattccacggtaactacaaaacattctggaaccgtgacgatatttataaatcatttggttttaataaattctttgatgcgtcatactacgatatgaatgaaaaagacgtagtaaactacggattaaaagataaaccgttctttaatgaatctattccgttattacaaacgttgaaacaaccgttctatacaaagtttattacgttatcgaaccatttcccttatccaatcgataaggcagaagcaacgattgaaccagcaacaacaggtgattcatcagtagatacgtacttccaaacagcacgctatttagatgaatctgtaaaaggcttcatcgattacttgaaacaatctggtttatatgataactcaattattgttatgtacggagaccattacggtatttcagataatcataatgcagcaatgtcaaaagtaatgggtaaagaaatgaactcatttgaaaatgcacagttacaacgtgtaccattaatcgttcgtgtaccaggagtgaaaggtggcgtacaacatcaatacggtggtgaaattgacgttcttccaacgctattacacttactaggtacagatacaaagaattatgttcaattcggttctgatttattatcaccagatcataaacaagtcgttgcgttccgtaacggtaactacgtaagcccaacagttactgcactaaacggcaaatactatgatacaactactggaaaacctgtagaatttacagatgaaataaagaaaaatgaacaaatggttcaaaactcactaaaatactctgaccaagtcgtaaatggtgacttattacgattctacacaccggaaggattcactccagtagatcgttcgaagtataactataacaaccgtgataaaaacaaaacgaaggtaaaaacgactccggaaggggaagctaaataaataataaaaggcgctattcatatgaatagcgccttttatttgtaaatataccatcattatgagacaaaaccagctgttgctttttgttttgcctttccgaagaaaactacaccgacgatgataataatgataaatgcccatttaacgaaagggttactttcgaaaaatccagcgaaccatttctcatctacaatcattttcgcggcagtataagctaaaacggctgctccgatcgtaatgatgacaggaaaacgatccacccattttaaaattaatgtgctgccccatacgactactggaatagacactaatagtccgatgattactaaagaaaagttaccatgggcagctcctgcaacagcgagtacattatcaatgcccattaacgcatcagcaataataatggttttaatagcagaccaaaatccttcttcggctttaatatcatgatttttgccctcagcgatcagcttgtaagcgatccaaataagaagtacaccaccaattaggagtaatccaggtatttttaataaccaaacgacaactaaggtagcgagagccctaatagcgattgctccaatggttccccaaatgataactttcttttgttggtctttcggtaatcttcttgctgctaatccaattacgatggcattatctccggctaacactaaatcgattacaataatggcaagcaaggcagacaaatattcaggtgaaagaaaatccatatacatatcactccttaagagtaatatgtgctaaagtgttgataatataaaaaaggattgaaattgtatattcaatccttttttgactgtattctgatatgtatgtttttattttgaataagtcgcttttgtagtttttacttatcgcgtttctttcttaaattgattccaagtttcttcagtttgcactataaatacgattatataacatctacttatttaaactaggttaaagatagcatgtgatatttcaaagttaaatttatttgataaaagggaagggacgtataatattgatatggtgcaagcgtgtataggttttctctataaggaaattctaaaaacgataaaaaagacttgataacctactagaggggatcaagtcttttcattacatacgattatcatgccagaagtttaatgggaagtgttcgttctcattatatgcttctaattcatatcctttttctttcagtcctttaataattccaggtactgcttttactgattgtggatgaatatcatgcataaggataacttctgttgggtttgtagaatgagctagaacgttttctacaattttagctgatgcagcatcaacttgcattttgttatatttccagtctaaagaatcaattgtccaatcccaaacttttaagccattgtctacaactttgttgcgaagagcttcgtttaatcctggcatagagccgtaagctggacgagttaatactggtgatttacctaaaacaccagcgattaagccttggtcttccttcatttcatctacgtaatgaccttcagtataaagtttcttgtagttatgagtcatactgtgcatcccaacgtagtggccttcagcatcttcgcgttttacaagatcagggaaagcttttacgtttgaaccaattaggaaaaatgttgcttttgcattttctttctttaacatatctaaaagctcagctgtgtattttccaggaccgtcatcaaatgttaaataagcgacttttctaacttgcccgttataatgttttggagcttctttcggagcaagagatgtttgaatctcacttacaagttgaacagattttgcttcatcctctgtactagctaaagcagtatgtactgatccaaaagccgcttcgtatgtgaataatactcccgcacaaactaacatagccctttttactaaagttgtcattcgaattccattgtgcataattttccttctctctataaaagttctactctactatattagcaattataggtagggaaatgcaaagaaacttttttacacttgtaaaaaagtttacccaaaagtatgcaagattttatatcaattgcagttttgaaaaatagaatgaatttaaactttattatttaaactttcaatcaccaaatcatactttcgtatcacttcgttttcgttccaaatattgattcgaatatttttgatttttattaaaatattcgtaaagaaacaattatatgaaaaaaggagcgggaatatgaataattatatttgcactacatgtggagtacagtatcccgaaaatgaagaagcaccttctcactgtaaaatttgtaatgaggaaaggccatatgttaatccaattgggcagtcatggataacattagaaacaatgcaaaatagcaatttatactaaagacctattgtttattaactaataggtctttcaacttaggaagctcacactaatgagggatgttaaagggaatatatctaacctatactaattactataaagctttggaaaatgaaaaggaggagatttgcatgaagaattgggttcaatttagaattgcaagaccaacagataaattggaagaagtgattagtttttatgaaacaggattaggattaaaacgtataggggaatttcacaatcatgaaggatatgacggggttatgtttggattaccagatgaagagtatcatttggagtttacttcacatgttaatggaagtccatgtccggcaccgacaaaagataatttactagttttttatatgcctaataaagatgaaattgaaaatatagtaaatcaattaagtaatatgggctaccatgaggtggaaccagaaaacccgtattggatagagaaaggaaccacaatagaggatccagatggttggagaattgtgcttatgaatgcatctgaataaggaaactattttcatatgaaatagagtgtagcaaaatgatttagacataaatccctacagcgtttgtagggatttttatataagaaaatcttattgagagagttattaaaatgtagaaagtattttggctaagaataaatgtagtaaacataatttatgaaggaggtataaaagtatgatagtaaaccattttaaggagttttctaaacatgttggaaatacacatctcattaaaagttctttcgtagtttatatcttattctacggaaaattgataccatcaaaaaactgtatgtttaacatgtatagttttttgatggtgtagctgtgcaatgtttaaaaatttcacataccgtattttaaaaataaatataggaaaaccaaaaagtaatgtagaatatatcgtacatacatatatacagtcaacataaaagataaagaggtgggtatatgttacttgaggaagtaatgcagcaactagaggaatatggaacagaacaaaatcgaaaaacgtataaaaaccacggagcgaaagagccgttatttggagttagttttgcgaatttaaaattgttaaaaaagaagataaaaaaagatcatgatttagcagttggattgtgggaaacgaaaaatatggacgcaatgacattagcaacttatattttagatccgaaaaaaataacgacagaacagcttaatagttggattcaggatgttgattattactgtttgatggatgttcttatgacatctatatgtacttcgccaattgcaatagaaagaatggaagagtggacaaagtctaatgatgaatggattggaagagctggctggtctttattagcaaatatagcgattaaaaataaaacgttacatgatgatttcttctctccgtacttagaagagattaaagaaaatatacataatgaaaaaaatagaaaaaaagaagcgatgaatagtgctttaatcgcaataggaattcgtaatgaagacttagagcgacaagcgattgaaattgcacgtgaaattggaaaagtagaggttgatcacggtgcaacatcatgtaaaacaccagatgcagaaagctatataaaaaaagcgagagaaagagctgaaaaaaagaaagtgaaataagaaaagaggatcggttatgaaagcaattgacgcagcacaaaacataattacattacaattttctaattgtgatgtagctttactcggcggaagcgttgtacgaggagaagcgacgaaaacatctgaccttgatattgtaatagttgaccaaagtttaacttcttgctatagggaatctttctatagtaatggatggcctgttgaggtgtttgttcataattttgaaacatataaaacctttttcaaaatggattgtgatcgagggagaccgtcgttaccacaattagtttcggaagggattgcattaaaaggggaaaaggaaattgttgagaaattaaaaaaagaagcgaatgatttactacataaaggaccagctaaatggaccgaagaaacgattaagcagaagcgatattttattacggatactttagatgactttattggtgcaacaaaaagagaagaagaattgtttatcgctaatttattagcggatttagtacatgaatatgtattaagagtaaatggtaagtggcttgggagttcaaaatggtttattagagtgctaaaaagatatgatgagcaatatgcaaacaaatttgtagcggcttttgattatttttataaaacgggagagaaaaatgaattaattcattttatagaaaagatgttagaacagtatggtggaagagtgttcgaaggattttctattggtaaataaaaaggggagagaaaaatgaatgtaccatatgttcaattaagagaattgacactagatgatgtagaagatcgctatcaatggtcattagatagagatgtaacaaagcatttagtcgtaccagatcaatatcctccgttcactcgtggagatacgagaaactggattgaagcttgtataagccgaaaaaatggttatgaacaaagggcaatcgttactgaggcaggtatacatattggatgggtagaccttaaaaattttgataaaacaaataaaaatgctgaactaggaattgcgattggaaataaagactattggggtaaaggatttggaatggcagctctaaacagcatgttacaaataggtttttctcagtttgaattggagaaaatttggttacgtgtagatgaagataatacaaaagctaaaaagagttatgaaagtgccggatttgtatgcgaagggttaatgagaaatgatcgattgagacaggggaagttcattcatcgcaatcgttacagtatattaaaagaagagtatgaatcaaaaaaagtagcctataaaaatattatgtaaattaaaaaggggaagataaaatgattcgattacttacaaaagcggatgcaaaacaatattgggagttacgtttacaagcattacaagtaaatccagaagcatttataacgacttatgaagaagcagtacgtcaagaaaatcctcttgaacgagttgctagtaatctttcatccaatagtagttttacatttggtgcttttaataatgaaaatcgtttagttggggttgttactttattaacagaagaaaaagacgcatataagcataaaggacatatcgttgcaatgtatgtagatactgaaaatcgaagaagtggtcttgcacgtgatttaatacgtaaagcaattgaaagggcaaaagagatgaagctagagcaattgaatttaggggttgtgtcaacgaacgaaccagccaaacgattatatgaatcaatgggatttaaaacatacggaattgaaaaaagggctataaaaatgaatggtgtgtatagtgatgatgaacatatggtgttgttcttttaagagaggaagttttgtatgaaaaaggcgaaactgcgacaataagatggtgaatatggcatatagcagatcataattggtatcatcaagctcatatcagtcgtttgaggaaattatacagagaatataaactacatattctttaatttttgaatgaacgaacgcccctaaataataattaaaggaggcgtttgtttttattcgttcgcttttcttcccaagctatcattaaatttttatgataatcttttggtttctcaatagaaaaccagtaaattgaatgtgcaatagttggtagccatcttttatagcggatgtgtatattttcatggtgagtatagtgggtcgagattaaagtagattttgacccttgaaaattttgatatgtaatggcctcgatttcataccaatgcactttattcccatgtaaatctactacaattccttcatcatcccaaagtgaaatgtaagtttgtatgtagatttttcatcgcgtatactaaaatatatgtcatagagataaaaaattaaatacaaggggttttacaatgaaagcaattgttatagggatattggcatcatttttctttgcctttacctttgttttaaaccgggcaatggacttagaaggtggaagctggatttggagtgcatcattacggtattattttatggttccaatgctattacttattgttatgtatagagggaacttaaagcaactctttcaatatatgaaaaacaatccgaaagaatggttagtgtggagtatcgttggatttggtctcttttatgcaccgcttagttttgctggagcgttcggaccaggttggcttgttgcatcaacatggcaaattacaatcgttgcagggattttgttaacaccattttttgcggtggatccactacataaaaaacttccgatgaaggaattagttatgtcgggcattattttattcggtgttgttctcatgcaagcagaacatgcttcttcattaggtattcgtgaaaccgttttatgtgtagttcctgtacttattgcagcatttgcgtatcctcttggaaatagaaaaatgatgcaagtttgtaaaggggaattagatgtatttcagcgagtactcggtatgacattagcaagtttaccattttggtttttattatctggttacgaagtatcaacaggcggattaccgtcaagtagccaagtttttcaatgttttattgtagcagttagctctgggttaatcgcgacagtattatttttctttgcaacagatcttgtgaaagatgatccgcaaaaattagcaacagtggaagcgacgcagtctggtgaagttttatttgcgctagtaggagagctgatctggttatctgcaccaattccgtcatcattatcttggattggtatgagtctcgttattattggaatgatacttcatagttatgtggctgtcgttgtaaaaaaagaagaaaaaataacggcgtaatgagattagctctttttattaagagttagtctttttttcatagaaagggatgaaaatatgaatttacatcgcgttgaacaaattgaaaaagattcaatattaaatgtgctacaatatgccgtcggtccaaatgaaataagcttaaagaaagcagtattattttatcaaagtaataaagggactttgtacaaatatgaagaaaaagcttgtctaggtattgaagtaatcggagcaactaaagcacgagtatgtcatatagcagtggctccagattatcgtcaaaaaggaattgcactgcaaatgattaaagaagtggtaaggatatatcaattgacttatatagaagcagagacagacgatgaggcggtagaattttataaaagaattggttttcaagttaaaagtttaggagaaaaatatccagggatagaaagatttcattgttacatggaaaaatagcatgaaaatatacaattgtacatattgaatatagtttgaaaaaaataataatttcattatataatataggtatctggaaaaatatagataaaagaagatgggtgtataacaagtgagaatggataaaagtaagtttataaaaatagctacttcaataggggtgtcatcttttttattaacaggttgtggtgattatgaagaagaaactgctcagcaagaaagtacagctgttaaaacagatggtgcaaaacaaagaaatgaacaagaaacattaaattgtgatgataaagccccaaccaatgaaaatgtagagaaagatgagttatgcaaggaaaataatccgtcattttcatcttatcatgaaaactctcatttaccgatacttccatttgtagcaggatatttattagcgagtagaacttcaaatatgaattatacagcaaaaccaaatttaatgaagaaaccgtatgcaaataatgttattccatatcgtgaaaaagatgagcgtagaacaggtggcggtagtagcggtggttatactggtggttctaacggtaacaataatacttccaataaagtagatttaaataaacagcagccaaatccatccaataaagtaacaccagatacaaatacgccaaaatcatctactacgcaaacaccgaaagtaaactctggttcaagtggaattggaaacgcaaaagcgccagcaggatcctaaaacgaaagggtaatggagtaatgtatacagaacgagagcaagaagagtatatgaaagtatggttttcacttgcagaagaggctagtaggaatggtttcacttggcctagtctgttagagaatgaagaatggaatcaatatatggcaacagggatgtatcgcatgccagcaaaaacttatactgctatctcaaaagcgacagaagaaatcatgtatgtgttatatagaacgtatcaatatattgtaaatacgacagaagattttcaaaaacttggattcccagctgaagcgtgggaaatggcgagaatgaaacataatggtttattttcatattttacaaggtttgattttatcgtaaatggtgacgatataaaattaatagaagtaaattgtgatacgccaacaggctatttagaaccgtctgtcgcaaatgaagtgttatgccgttatcatgatgtaaatcacccaaaccatatagaagagcatattgtgcaggcatgggaacaaattaaacatgactatcatataggccctgaagagacgatatattttactagttatgattggcacgatgaagatagtcaaacggttcagtttttaagaacgtattgcttaaatcagtcaacggactatgtaggaatacaagacattgtcgttgcggaagatggtatatatacgccaagtggagaaaaaataaaatatttatatagactgtatccaatagagtatttagtaacggacgttgataagaacggaaaaaggattggtttacaatttttagatcatattgcgcaagaaagagtgaaaattattaatccgccagccgcgtttgttatgcaaaacaaaagtgtactcgcactaatttggaagctttatgaagaaagtgttttctttacagaagaagagcaagacattatttataaatactttctaccaacatatttttcaaataagcgatttctagaaagacatgaatcatacgtttcaaaacctgtatttggtcgtgaaggtggcggagtatctatatacgaaaatgatgaattattagctgaagataaaacagagtattactttgaacaaaggaagatataccagcaatacatagaaatgcctgactataccattgacacatgggatggtccatatactggtaaactattaattggctctcactgtataagcggaagagcagcaggcttatttttacgtgtaggtgagaaaataacgggaaacttatcaatgtttactggggttacaattgaaggataaagtaaacaaagagctcatcatttgtgatgagctctttcgtctatgtataaaacagctttttatggttggatgtaaaatcttcactttctttttgtgttttaaatctgaatattataattcaaatattttttgtgtaataatattactattttttatagatgtgaaaaatgattaagttaaaaattaagaaaaatatgataatatatttatataaaagtttaaatttacgtagctagtgggggaaccaatatgaaaatgaatgaaatagtagcaagtacacaatttccaaatacaatcgaaacaataacaaaagatttaaaagcattaggagtcgaaaaaggaatgacaattatcgttcattcatcactaagttctatcgggtggatatctggtggtgcggttgctgtagtagaagcattaatgaaagttgttacggaagaaggaacgataataatgccaacgcaatcttcggatttgtccgatccgaaacattggtcaagaccacctgtaccggaagactggtggcaaattatccgagataacgtcccagcatttgattcacgtataaccccaacaaggggaatgggtgaaatagttgaatgttttcgtacatatccgaatgtagtacgtagtaatcatccgttaggaagttttgctgcatggggaaaacatgcagtagaaataacaatgaaccattcgttatcaatgagctttggagaagaatctccattaagaaaaatatatgatttagacgggtacgtattattaattggtgttggatatgattccaatacgtctgttcatttatccgaggtgcgttctggtgcatgtgagttaatacaagtaggagcacctattatagaaaacggtgaaagagtgtggaaagagttttttgaaatggattacgaatctgagaagtttgtagaaattggtgtggagtttgagcgaaaaggaactgtaaaaaatgggaagatagggaatgcaacgtgtcgtctaatgaaacagcgtgatatagttgactttggaacagaatggtttcgtaagaaaaattagtaagggatggttacaatgaaggggaaaaaggtattaattacgagcggtggttgtctagaaaaatgggatcaagtacgcgggcatacgaatatggccaaaggtacaatcggaaggataatcgcagaagaacttctagctaaaggggcacatgttatatatttacacggttattttgcggagaaaccgagtgatgtacatagagggttagaattacatccatttgaaggaatcgttgatttacaagataaaatgaaaagtatcatatcacatgaaaagattgatgcagtcattatggcagcggctggatcagattggattgtggagaaaatttgtgatcaagatggtaatgttcttaatatgaacggaaaaatttcaagtgatatagcaccgattattcactttcaaaaggctccaaaagtattaaaacaaataaaagaatgggacccagaaacagtacttgttggttttaaacttgaaagtgatttaaatgaagaagaactgtttgaaagagcaaaaaatagaatgaaagaagcaagggcgaatgtaatgattgcgaattcaccacattctttatattcgcgcggagctgtgcattatgtaattggacaggatggtaaagggaagttgtgtaatgggaaagatgaaacagcgaaagaaattgtcaaaagcctagagttattatgtaatcgtgtcactgctttttaaaattaagtttttagatgagaatgaatccgcatagtaataagtaagcgaaactttaattggtgggaattttacttttacacgaatgtgaagcgtataccaatcaagagctatacacagaataattggtgaggagtggattctatggaacatttattaaagcaagctattaaacttagaaacgaaaagaaatatgcgcagtctaaagagatgcttataggattaacaaactttacaaaggatgcagaagtactgtatcagtgtgcgtggatacatgatgtaatggggctagaaacagaagcagttccgtattatgagcaggcaatcgcaaatggacttgatggcgaatcgctttgcggtgcttatattggtttaggaagtacatatcgttgtataggggaatatgaaaaggcaattacagtattagaagctggggtgaaaaaattcccagagaacgctccgatgaaagtatttttatcattagcaaaatataacgtaaacgatcacgaatcagcgatgaaattattacttgaaactgtcgtgaaagtagaggaagtaaaagaatttgaacgtgccatttcattttataaagaccatttaaatgaggtttttaaataaaggagtgaacgtatggaggttacactatcacgaaggcgaaaaggtgtttggattggactcgtatctttaattatgctattaaactatttattgtatgcccttccaattgtaccagttgcgccgaaagaagttgtgcttgggtcattattagattgcatgtttgtcattccaatcatcacgtatttcttcattattcgaaaaagatactcgttaacgtatatagttcctgttgtaatagctggttatatttttgcaagatttattattccaagtgactatttacaagctttttcattcatctcttatattattgttgcggctgaaattgcatttgtaggtctagaattattccttctctataaaattgttagagtgcttcctaaaataataaaaaaatataaagaatatagaagagaaaattattccttttcttatgcaattgatgcagcgtttgacgctactatgaaaagaagtaagttagtagatgccattctaacagagtgtaagttaatctattatgcgtttttatcgtggcgtgaaaaagtaccaacaggtaaatctgtatactcatatcataaaaagactggtgctataggtgtgtatatcatgattattcatgcaacaataattgaaagcattggttttcattatttactacatcagtggaatccagtaatagcatggattttacttattttaaatgtatacgcgatgatttattttatagctgaaatacaagcgatgcgcaaaaatccccttgtcgtaacagaagaacaagtagtcattcaaatcggattaggaaagaaaattgttatgccatttacacaaattgataatattgcgttctacaagggtgaattgctaacggcaaaagaaaggaaacaggtattggatgcaactgttatggagttcataaaagaacctgctacttttgaaataacattaaaagagccagtgaaagcgcagttgttatacggcttttctaaaacagtaagtcgtgtttacttaaatgttgatgaagaacgaaaattttatgatgcggttaaggaaaagttaaaacatgagtaatagtgctgttagttacataaaaacaaatgagcttccgttagaagtgaaaaaatatgaaacatggatagtgaaaaactctttctaaataagaaggagtttttattatatacttttataaaacattatataaaaaactatacacttctttatcactacataaatggatataattgaggatagaactagcataaggggaaacaaaataatgaataagttacttacatcgaaaattgaaattatagaaagaaaaatccggtataactcaacaatagtagatcacaattgcttattacttgaaaagcaatcacaaagtatcgttttatttcacgaggtgcagtattcatttacaatgactgcaaatgatactaagttaacaatcccaaaaggaagttatacaatcgcatattactggaaagatcgtccgtacaatttatacgtatggagagatataaaaggaaagtatttaggttcctattttaatattgtaaaaaacacacaaataaaagatgaagtggtttcctttgaagatttaatcatcgatattatggtacttccaaatggagaatacttcatattggatgaagatgaattaccagaaccattagggaatttcgaaggtggttatgtgaggaaagctctttatggattaaaagaaatcattcaaaaagagctgccaccaatagttttggagacagccagggtgcagaggaaataaaatttaattacataaatattttgaatgggaatgagtagtctcaagttatatgatctaacttttttaataaatctaaggttagtagcatatttcttgaaattactcttttttttgtagaaatttcgtcgcttagttattaaattccatcaaatgcatttagcgtgtgagttttcttattggttacagtggattaaaaatcagaaaaaatagtaagtaaatgatatcgttcaaataaacaacagtaaaaatattcaaacgaatcatatgtatgttttgataaaacctagttgacttatcggaaatatttgtataatatgtacttaattccataacgtattgctgattggagaaaccaaaggcattttatctgttgataaaatgcctttggtttttttattgcacaaatactgaatctgttcatttatatgaatcattttaaggaggagaagaaatgactgtttcaattgatggggtatcaaaatattttttgaaacaaactggtactgttcaagtattagagaatattaattttcaattagagaaaggggattttgttacagtaattggtccgagtgggtgcggaaaaagtacattactaaaaattgttgccggtctagataatgattttgaaggggaagttgttattgacggggagcctatcttaaaaacgagcaagaaacaaggttttatttttcaagaacataggctttttccatggttaacagttgaagaaaatatagcggcagatttatcgttaaaagataagtatgtgaaagataaggtaagagaatgggttgaaatcgttcggttagatggctttgaaaaatcgtatccgaaagaaatttcaggcgggatgtcacaacgtgttgcgatagcgagagcgttattaagagatccaaatgtattattacttgatgaaccttttggagcgctggatgcttttactcgaagtcatttacaagaagtattgctaaatatttgggagcagaagaaaacaacaatgatattcgttacacatgatatagacgaagcgatatatctttcaaaccgaatcatcattatgagtgcaaaaccagggaaaatacataaagtgattgaaaataatttggcttatccgcgaaataaaacttctcaatcgttccaacaacttcgaacgaaagtattacagcagtttgaatatggagggttgattcaaacaagtatataggaaaagggtgattttatatgtataaaaaattaaaaattctttcttttgctttagctatatcagtatgtttgttaggatgtgaaaaaagtacagcaagtagtaagaaagaagatgtaacaatacaaattggtatacaacaaggattaagcccgctattactagcaaagaaaaaggggtggtttgaagaggagtttaaaaaagaaggagttaaagtgaaatggacagagttccaaagtggacctccttattttgaagcaatcgcatcaaaccgattagactttggtgaagtagggaattctccagtcatttcagcgcaagcagcaggtattggatttaccgaaatcgccaatacaagttatgcgagaaaaggaactggaattctcgttcaaaaagatagtaagattgcgagtgtaaaagatttaaaaggtaaaaaaattgcagtagcaaaaggaagtagtgcctttaatttattatatcgagcacttgataaagaaggtattgatgcaaaagatgtaaatgtcattcaattacaaccagatgaagcgcagcctgcattcgaatcaggatcagtagatgcatgggcgatttgggaccctttcatatcattacatacgttaaataaaggtgcgaaggtgattgcagacggtgaaacattaaatgtctcttcaccagaatttttaattacgaggacaaaatttgcgaaagaacatccagaattagttgagaaattcctcaaagtttatgagaaagcacgtgtatggcaagatgctaacttagatgaagcaataaaagtatacacttctgtaaaaaagatagatgcgaagatcgtaaaagaagtgtttaatcacgacaaaccaattttagttccggtaactaaggaaataatagcagaacaacaaaagactgcggattttcaatataagctcggttctataaagaaagaaattaagacggaaaaagttgtagataattctttcgtagaaaaagcattgaaagcgaagtgaaaagaggttttgtaaagtggaaaatacgaaagctgttatgaaaccagcgagtataacgattaagaaaaatggcataaagaaggtacgaaagttaaatgtaaaagttttagtaagggcgattactataccggttattatattaataatttggcagttggctggcgtattcggtcttgtttctaaaacagttttaccaacaccattagatatttttctagctttccaagagcttattaaaacaggagagttattcggacatttaagtattagtgtattcagggctgcggctggtttctttattggtgggggcttaggaatcattttaggaacgattgttggattttcaacgagaagtgagcaatatttagacccatctgtgcaaatgttaagaactgtacctcatttagctgttgcgccgctttttgtattatggttcggttttggtgaaacatcaaaagtgttattaattgcagatggtgcattttttcctttatacgtaaacgcatttttaggtattagaggtgtggattcaaagttatttgatgttgcgagagtgttagagtttagtaaaagaaaattaatcacgaaactaattttaccagctgcattgcctaaccttttactaggagcaaggttatcgttaggtgttgcgtgggtgagtttagtagtagcagaacttatggggtctacagaaggtattggctatatgattatggatgcaaggcaattttcaaatacagatatcgtatttgtcggcataattatatttgcatttgttgggaagttttctgactctctagtacgtttactagaagtgaagtttttaagatggcgagataactttaaaggtgagacagggaattaacatataaattattaggggtaatttatatagaatgtgttagtatacgattcaaaataaataaggggtgtgtaaaggtatggaattattatggtttattccggcttatggagatggtcgatatttaggaacgacaaaacgaggaagagcagctgaatatggttattataagcaagttgctgcggcagctgattatttaggatatacgggtgttttacttccaactggtcaaggatgtgaagacccttgggtgttagcttcagctcttgctgctgaaacagaaaaactaaaatttttagtagcagtgagaccaggactaatgtcccctacagttgcagcgaggatggcatctacatttgatagaatttcacatgggaggctgcttattaatgtagtagctggaggagatccagttgaactacaaggagatggattatatcttgatcatgatgaaagatatgaagcagcggatgaatttttaaaagtttggaaatcgacattgcaaggtgaaacgatctctttagaaggaaaacatattaaagttacagatagtaaagttgtattcccaccagttcaaataccatatcctcctatatatttcggaggatcgtcaactgctggaaaagaagtagcagctgaacatagtgatgtatatttaacgtggggagagccgccagagcaagtgaaagagaaaatagaagaagtaagaaaacttgcagaagagaaggggcgtacagtgcgatttggcattagattacacgtaattgtaagagaaacagaagaagaagcatgggaagaggcagaacgtttaattcaatatgtggataatgaaacaattgagcttgctcaaaagacatttgcaagatatgattcggttggtcaaaaacggatgacccatttaaataaaggtacgagagagtcgttagagataagccctaatttatgggctggaatcggacttgtaagaggtggggcaggtactgcacttgtaggcgatccgcatacagtagcagaaaggataaaagaatatgaatcgttaggaattgatacgtttgttttatcaggatatccgcatttagaagaagcgtatgaagtggcagaattgttattcccattattgaaagacgagaagaaagaagaaaataaaattgttggtgaaatgattgctgatgcatatgcattaaaaaaatagtgagaaataaagtttcacttatttattgcttcattttgtttactgcctgttaacacgagataaaaaacccgcaagttattcgcttgcgggttttcatcgtaaattattagaaaatatggtaaaattaaagggtaacttaaggtgcggttggttgttcaattatcacttctccgagtaggaggggggtgataatacgtgagtgaaatagcgttgctactgcagggtggactgtttctcgttgcattgttaacgttcgtcgtcgttttaatagacaagctcaaaaaataacaacccacctatgcctatagaatgtgggttgttttgtttgtaagaaacaaataggataaatgaacaatccaatctgctaagttacgtggactagtgtgtagccgcacactagttttttttatttatatacaatttataattggtttatgtgattgtattgttcttttcatactcattataacacagtgtcttttcatcaagaaaggagaccgtatgttctggtctctgttatatagtaggtgctttttctttaaacagcccatccatatactgttttaaactttggacataaaatttttgtgtattcacattatttacaccgacaatgggtgatggaaggtcaaatcttttttctgataaatgaacgacaacatcaaaaatgtcaaacaaacgaatgaagcaaaacagaccgtctttatcgctaagtaaaataaagtaatgattttcactacttgtatttagcgtattccataaagaacttttgcttaaatcacgtacaatgcttttttcttttagttccacgaaatctgcatttgagagaatggtagagatatcaatcgcatcttgatcttcaaagtagccatcaactgtttgtacagcgaatgtataagccatttttaatatactcattttatatttacggttatccaatagcaattcacgttgaatagaactggctactttcgttacacgttcctctttccaaatttcattatgtaaggaaatatcgtgctttttacatagtttcataattaatgcattagaataaagaatttcgtcgcttacttcgacaacatcagtctcagcagccgcaagttcctcaccgtgctcatttgtatagagtggggaatcaatttgtcttttcatttgttcaatcttaaattgactcaatttatgcctaattaaaggacgatcaatatttgttgtcatttgttcatgacaagtatcacaaattgagtttgtgaaataatatccacataatatttctggaatgacatattgttcactaagttctttcgtatcttttctgcaaatgatgcattgtgtcatttttatcacctttacctgcaaatttgtatataatctcattgtagtgtatttattggtattttggaatattgtaaaggaaaatattatgtgaaattcatacttattttggtacaatgaagagaagtgctagtttaaaggaggccatttttttgaaatcaaaagtgcacttttggacattagaagtgctaatggttgtaggaatcatatttatttgcacaaaaatatcatttttatttcaaccgattggtatcttcatatcaacattatttttcccaatcttaatcgcgctttttttatacttcatatttaatcctgtattaatctttttggagaataaaaaagtacctagaaatttagcgatattgctgttatatctttttatcataacattaactgcggttggcgttggagtagttgttcctacgatttcacaacagctaatggacttagtaaaaaatatgccaggctacataaaagagggaaaagtatacatacaagaattatcacatcataggttgtttgaatggttatctacacaaaactacgtttccattgaaacaattgaaaaaaatgcgattgaatacttaaaagatataccaaatacaattacgtcgagtgcaacggctttatttggtattatcacgaacgttgcattagttgtatttactgtaccgttcattttattttacatgtttaaagatggacatgcctttccaggaaaagcggtaagtttattaccagagtcttaccgtgaagaggggcttcgtatcattaaggaaacgaacgaaacattatctgcatatattcaagggcaagcgctcgtttgtatatttgtaggtgcgtttacttttatcggttatttaattatcgatttaccgtacgctttcgttttaggaattattgcagcatttacaaacattattcctaacttaggtccatttatcggagcagcaccagctgttattgtaggactgttcgtatctccgatgcaagccttatacgtaattattatcgtaacaattgtacaacagtttgaaagtaatattatttcaccacgtattatgagctcgaaattaaacatccacccattaacaattattatcctaattttaggggtaggtaactttgctggaatcatcggaatgattttagcagtaccagtttatgcagtaacaaaaacagttgtttcaaacttagtgagattgtttaaaacgaagagaagtaatcggaaatagtaaaacctgagaaagatacacctctatttaagtggtgtatcttttgtttataaaaaaataattaaaagcgggttgatatgattttattatatattttttatacatcaaattcagcgatgaacttgtgtgatataagctctataaaactatgtggaatccctctgaactatccaaatcatttccttacgtgctatcatcatcataatcgactcctttcaattctatatagttaaacgattaaaggtgagtgtagtatttgcttctacgatctcgaatttcatcaataacttgtttatattgtctttcttgttttaattcattttgagatattgtttctttttgaatcgtaatcgttaaaaagaataggtgaaacttcatatgtgaattcctcctttcgaattggaattacagatgactacagtaatgactttgtctttcttttacagaatccatagcctgattaatttgtcgttcatgaagcatttcagactcagaaaatttatttttttgaatggtaatggttaaaaagaatactttaaatttcataaaataattgcccctttataagtgatttagaaaaaacgagtgtaataagaaattacaggtgactacagtaatgactttgtctttcttttacagaatccatagcctgattaatttgtcgttcatgaagcatttcagactcagaaaatttatttttttgaatggtaatggttaaaaagaatactttaaatttcataaaataattacccctttataagtgatttagaaaagacgagtgtaataagaagattgaagctcttttacttcgtccataatattttgaatgtgttgttcacgtaaaatctctttctgtgagagcttacgtttttgaatagtgattgttaaaaagaatgctttaaatttcatgaatatattacccctttaaaatatatttttaatacatttgagtgtagtatgaacttttaatgtcagttattttatcagtcagttgttttaactgttgtttacgattgatttcagtttcagataaagtatttttttgaagtacagtcgtaaaaaagaaaatatgaaaagtcataaatgaattcctcctttcgaaaaggaattacaggtgatcacagtaaagtgcttggcgctccttaacatcattcatagctttttcaatttgctcattatgaagaatttcatctttggaaattatatttctttgaatcgtaatacttaaaaacaatacgctaatagtcattgaatgttgctcctttcttagaaaaataatgtaagagactaaaaaatcgcgcaaaaaaaccacaggaagatacagttctcctatggctgggcgtgaaaaagccacaggaaagtatacggcctcctgtggcgaatttatgaattaaatgaaataaagtacgattttcaattctccattagggtggtcgaattcatatttaattgtccagaaaacacaggtgcagttaacgctaaagttaatgcatgtaattgtaatttcatcatttccttcgacctccttttagaatttttttcttacgttagtaagtatatacaattaatggataattgtaaacataaaaaatgaaaatttttaattttgattaaaatgcgtatatttaaaagggatttgaaagtaaatattgtaattaacgaaatatcgataaaaatgggggatgctaaatgaaatatatgcatcataacatgatcgttatgctaacaatttttttattcattgcggcttgttctaatggagaaagaataaaagatatatatgatattaggtcagatgattttaagaaatatactgggacatacgttggtaataattcagatgtggttgcaattgttaatcatttacccggtggtggaacagttcaaagtataagtttagaaaatgaaaatataaaagtgaactatggcgcaaaagaaagtggggctcttacagaagaaatgattgagacgtattggtttgatgagaaggatacgatgaagaagaattttttctttaatgctatatatttagtgattttagtgccaaatgcaaaaagttatgagtttcaggtagagaataaaaactttaagataacgagggaagaaatgttatcaattttgcatagaatattcgatgattttccaaaagaaaaagatatatgggataaaaataaagttataaagttctttaacggcaatgaagaaaaaattaaaatgcttgtggaagataaagattttcggaaatctttatttgctaaatatccagtgagccagttgaaataatggaggggagaagatggagttagtatacaaaatttcttatcatagaatgcaggatcattatttacctaagttagtacaggcaattaggctcgttagtgaagaagatttgtggaaacaagagaccgctgttaattcaattggtggaatcgtactacatatttgtgaacatttacagagaaatacaaggcgttataaggattccaatatagtttttgaaaatggaattgaagaatattttccaataaaacatttaagctccgaaactttgttaaaaactgttgaagaaatatttgatgagtggggaaaagtatatatacaagtatgggaagaaaaaaggcatattgatcttcatagtttattacatttagtggagcatacaagttatcatttagggcaaatagtagatcgtacaaagtcaataaagggacaacaatttaacttttgtcaaaatggtataaatgaaaagaatttgagaacaagagttgaaacttcgaaattttagaaagagagtcattcttaaacgaatgattctcttttttgtaaaagaaatttatggaaaaaaacatttttatgtgatatggttaattacataagtaatgaacctatgaacctaaggtggtgaaagtgtgaaacctactctggagcaaaataaattaatatacttacaaattgcagaaacgattgaatctgatattttaaaagacatattgcttgaagaagaacaagttccatcgacaaatcaatttgcgaagatgttacaaataaatccggctactgcagctaaaggggtgaatgtattagtagatgaggggattttatataaaaagagagggatcggaatgtttgttgcaaagggagcgaaagaagtcgtactaaaaaaaagacaaaatacttttatgactgaatatttacctaaagtgtgggaagaagcgaaagtactagaaatatcaaaaaatgaattgatggatatgattcaaaagattacgaaggaggggaaagagggatgattgcacttgaaacgaaagatgtaacgaaaaaatataaaaagaaaatagctgtaaatgaagtaacgatctcattggaagagcataaaatatatggtttgcttggaaggaacggagcagggaaaacgacactattaaatttacttgcaggtcaaattacttcaagtagtggaagcatatcaatatttggtgaacatgtttttgagaatagtaaagcgatgcaaaatatttgttttgttaaagtgaaagaagctgcatatctaaataataaagttaaagagatttttaatttatgtaacatgttttataaaaactgggatcaaaagtttgctgaagaacttgctaggaaatttcaacttaatttgaaagaaaaatatcataaattatcacacggaatgcaaactgttgtcggaatcattcaaggattagcaagtagagcacctattactatttttgatgaaccaactacaggtttagacgcagcacaccgtgaattattttatagtctactactagaagattacggtgagcatccacgaacaattatattatcaacacatttagtagaagaagtaactcatgttattgaagatgtaatcatcataaaagaaggtgcacttgttgttcaatcatcagtggaagatttattacgacaaggtcatattatttcaggaaaaaaagataaagtggatgagttttcaatcaataaaaaagtaataaatcgagaagtttatggaaataagaggatttctgttatatgggaagaactttctaatgaagattattactctcttgaaaaagaagggttatcaattgatagaattacattacaaaaactatttattcatataactgggggtgaaataaaatgacgatgttaatgaagcagttgaagttacatataaaatatcagtataaagccattcttatcttttggactgtggcattacttataaaagggacaatgactgcaactgatttaaagggaataaaggtagcatttttacatgatattttcaataattcatcaattgtaatcgtaatgtttattgtgataagcgtgtttcttattcaacttgatatttttcctacagtcgtctcgtttggtgtcactaggttgcaatttttgattggttcaatatgttttaatttattgcaatcagcattgttttcatgtcttcaagctttgtttttacaggatacattttataaaacagaacatgtaaatttaggagcatctgcaattgaacaattctttgtacaattcatattttatagtacattagcttgtttattccaatcaacaactattgttcagaaaagatttaattggttcggattggcctttagtataatagttttattcggattggcgagtacaatgtatgcagggataggtataaaagagttggtgtttattaatagtaaaatgttactagaaatacctaatttcatattagtttcaatagttcttatttgcatatatattgtaattagcgctctatttattcgtaaggtttcgtttgaagatacaatttaaatacaattattttaggggagaaggaagagtgaatgggagatacttcttcattaataaccgtttttttatgcattgcactactaatattttggcgtcgttatcgctccatgtataagccaataaagggatcgggaaaacgtattttatggccattactatttttaacaccaggtattgtatggtttttaggtcccgtacatccagctgtactacaagtggctatagcagcatttattgggattcttttctctgtaccacttatagcactaacaaattatgagcgaagagatgatgggaatatttatacgaaaaaaagtgcagcttttttaattacttttattgcacttgtcgttttaagatatggttcaagacaatttatcgttgatttagatcaacaaacgattggtttattattttacgttgttgctgtctcgtatattattccatggagaattgcttgttatataaagtttaggaaagtttggcgggaaaataataatcatgctatatgaaaacttctcatttgagaagtttttttatttttataggtaagcaaaacaagttgttgaagggcaggctgtcatagaatatgatacatattataatgaggaaaagttgaggggataaaaatgcgtacaattttactttttctaaacaacatgtccatcgataaaatagagaacattagacataaacatgatcctttatttggattaattccaccgcatataacaatcgtattcccgtttaagagtaatatttcaaatgatgaattaaaatctcatatttttaatgtatcaaaagggggaggcaaaattgaaattgagtttgcaaatcgtatcattagcgtaggaaactatttgtttttagaagttgatagaggaagaaaacaaatagaagaactacatgataggctgtatacaggacctttattacaatttttgaaagaagacattccgtacatcccgcatgtaacagtcggaagaaaagaaagtgccaaattagctgctgaagtagtgaaggagattcctagttttcatgggaagttaaattgtgtgattgatagaataagcgtggagcgaattggagagaacggggaatcaattattgaatttgaagtgccatttttaaaaagctgacaaaagtcagctttttatttcgtagcatgaagtaatgcaccaattgcaccgctattaccaccatcttgtaaaaagattggtgttttattttgatattcggtgtagctacttataatatgttgaagttgtacgttattacataaagtcgaaccaatataaataatatgtttaatgttttttgtttcagcgaattgaaggcttaatgcagtaacgacttcaccgacaagtccttgtatagtagcaagtatgtctgagctattatatttcgattctgaaatagcggctttaccaaaattgctagcagttaagttattatcgataggggaaagaataccactataaatatctccaaccgtaatatctagttcttttctagatcctacttttgttagagggattacatcttcaaaatgatttgtatttgttaacaattttgaaagtcccataatagtcccaccgccaactccggttccaccagcgcgaatatattgttcattataaacataatggatagaagtacctgtaccgatattggttaaaataaaattgtttatagtgtgtttttcttcttttaatatgtattggacacctgcaagagtagattcaaattcgtttagctctattattttatatgaacctgtaagcagatgctgtaatagtttcgatttaccacccgtaatacatatttgttttatgccattgttgtttttaatccaatctattattttatgttgttcatgtgaataaaatttttcaaaagttaatagctttttttcgttaaaataagctattttcgttaatgtgcctccagcatcgataccgatagtacgttccattttcctgctcctaactacgtaatatgttttcctatttacttaattggttgagaatagatatttccaactgatataaggaacactttaatctgcttgatatattaatagtttttctatagttacaataggctggtcgtttacagttgcaatacctttaccaagaataaaacctcggcgattgcgcgttagctcataatgtaaatcaagtttatcaccgggatatgcttttccgtggaattcaactccatctaaagaggagagaaatcctagtccttcagaatcacttgtatgtacaaatgcactaagctgggcaagtgattctacaattaacatatgaggcatatgtttttgactatcatttataaaccattcgttatttgtaatgagtttatatcctgtaacggattcaccttgttttacatttgttactttatcaatcattaaaaatggataacgatggggaagcgtgtctttaatatgcatatgaaagtacctccaattaataatacccctgctaaagttaagcaggggagtgggaactaatttttaactaattcatctactttttcaaggacgaaaatgccgctatttctaatattttcaacaacttgttgcaatacttctttattttgaacgagtgcaatacgtacgaagccttctccatgaggtccaaatgcatgaccaggtgtaacaacgacattcgcacgatccattaatgcataagcgaagtctagagaagtccatccttgtggaatttcagcccagacaaacatactaccagctggcttatcgacattccagccaaatgctcggaatccatcgactaaagtatctctccgttcttgataaatatcgcggtttttctcacaaaatgcagcgccatttcttagtgctacagatgccgctttttgaattggtaaaaatacaccgtaatcggtattagatttaaattgagtaagtgcacgaacaatttcttcgtttccaatcatatatccaatacggctacctgctaaactataactttttgacaaagaattgatttctacaccaacttctttagcaccaggtacagagagaaagctaattggcttattaccatcgaaataaaattcagcataagcaaaatcatggacaacgataatattatgctttttcgcgaatgcgattacttctttaaagaaatcttcatgagccattgctggaacgggattccctgggaagtttaaaatcatcatctttgcttgatcggcaatttcttcagggatgacttctaagtctggtaagaaatcattctctttctttaaaggcatgtagtaagatgttgcaccagccatttgaatacctgtttcataagctgtatatcctggatcaggaactaatataatatcacctggatttgcataaaccataggtaaatgaacgagcccgtcttgtgaacccattaacaataaaacttctttatccgcatttaataaaacgttatgagtgttgttgtaatattcagttacagcttcgtgaaattcttgaatacctgataatgtatacccgtagctctctttctcactcgctgtatgtaccattgtttctcttacaaaatcagcgggcggcatatcaggatttccgatgctcaaatcaatcatgttatgacctgctgcaattttttcttttttataggctcctaattcactaaatatagaagattggaatgctttcattctagttgctaacgtgtaagtcatcaaaacccctcctaaaacagtgctttcattcttcatttttaattattctgaaaacacatgtttatattttatcatttttttatgaaaattaaaacgattgacaaatttagaggaaggattagcctattttgaaaagtaacgatgtaaatagcgtagatgtgttaattgaaatgtctattataggattcattttatataacttaagatattttctagtttttattaagtatatttctcatgttttgaatgaaaaagaatacgaaaacaagggctatttttgtggacgatttctaaagtgaaataacgcagaaaatattttctgcgtctcctctgaaatgtaatcatttctttttatatgtgcataatttttcggctgtcaaaaagtatacatttaatgtaccgtcggcaacttttaaagtttggtccgatgtaaatgaattaccataatcaatgtgatatatattagaatttttgacaaatgagcctttatataaatcgtctttattctttgttgtttgcatttctactaaattttgcacaatttcctctttattttcttttttgataactgtttcaaatttataatatacagggcattccccttttttattgtcaacgacttcccaagaaccgtatatatcgttattgctgcatccactaagtaggatgattagtataggaattgtaagtagaacctttttcattttgtgctcctttcttttaaattttaataaacgtgcgaatacgatagggatattataataaataaagtttaaatttttttaaagaattatttaatttcatataaaaatttaggagaaattaaataagcatgaatctagtgtaaagtcagattcatgctagtactatagcctatgttatgtcttttttgaggataaataaagaggaaagcagaatcactattccatttaatatatatacgcttgcggtcataaaggctaacgtacctgcgccaaatcctgctttatcgaatatagaagcaaatgttgcgatagtcaaaaagataatgggagtcagtagtaaaaatatgaaacctgccacgattctttttttaaaactatgtccagataaggaaatggctaaaaagtttaggatgctaaacagagcaattgcaaagagcaggacaataaatacttcgatgccatcagacattttaccactccttttataaagagtactttttataatctattcgaaataaaagggggatactcctttaggtaatttcaataaacgtaataaataggcgtattataaaacaaagaagtatggattcaatattagacccatacttctttgtttattttataaatttgcagattgcgaatgctgtttttcataatgtttctgcttagaaagggaaatagaaataatcaataatgaaacgactccaaagatgagaaccatatattgtaacccaattgtatctaagaagaaacctgtgccaagtaagacgatttggaacataaccctctcaaacatattacggaatgagaagaggcgaccgtgataacttttttccactttcgtttggaaaatcgtcgacataatagggaagaagcagccaacactaaacccaaacaaaccaaatgatgtaagagccatccattttatatcgctaaagaacaatgacagatgtgcaaaagcagtacaaactgcgaagaaatatagtaatttttcaggtttgaaatgatcagatagacgtttaattacgaaggcacctaacataaatgcgacaccttcaattgtatatatgaaccctttaatcgtaggatcatgttgcatttcgctaatgttaataaccattaaattaaacccagctataaataatagagggatgatacttaatataagtgctgtaaaagcaataggaattccttttaaaatacgaaatacttccataaagctattatcttttgcagcttgtttacttggtgttgttgattttttgtcttcgaattgtaggaagaaagtcgagaggaataataaggcgtatgctgccattgagaaggcatacatgtactgtaaactcatcacaactaaaagaattccacctagtgaagtgcctgcaatacgagcaattgtaccaacattcatatgtacaccgttcatttgtaataactcatgctcacgtacgatgagtggaattacagattgtaatgcagggaaataaaatgctgctgaaatttgaagagcaaccataaatgcgatcataaatgcgatactttcaaattgaatagcaaaaaacatgaaaataacacttaaaactcgaccaaacccagcgtaaagaagaacttttttcttttcatactgatcgatgacacggccagccataggtccaactagaacaccggctaatagtccgataaataatataactgatttcatgaaatcagaagggacatatttttgcataaattcaaggttgccaagaataccaagccataatcctagacctgcaataaactccccaattagaacaatccaaacgtttttattacgccacataacataaaacctctccgtcttttaaaatgaaaaactcgtatataaaacctccttatttatgcattattttcatacgaacttttttagagtcagagtctatattacgtgtttcataattggatttcaatctttttgatttgtcaaaaatttgatgtgttaattgatgtaataagtgaatcaaaacgtaaaaaatttatgattaaagctaatagaaagtaaggatacatataaaaaagcaagaacgtataactacgcctcgcttttctcaagtacaaaattaaatattagattcacttagcaacatttacgctcttgtccaatagctaaagcgctaaaagatagtgggccaacaacttctgcacttgcaccactagtaaggttttctacggttaatgaatattcgtgtgttccactgctaacgttttgatctatagcttgaaatgtttgtacgtagaattgttcagaacctgttgattcaatacctacttgtgtattgaaaagttcaatattatcacgaaaaattcgaaataaaacttgggaaatctcagttataccttctacaccaactgtagcgattaattctactcgattatttcgtgaatctctacttgaaattctcaattttaaatttgctaaaattgctttatttggagaagctgggattgcaaaagttgtttcaccagttttacttataggctgagtagcttggtaatcaatgatatgagtcatattcttcacctcctcatatactagaatatgaaaatagtgaagaattagcttggacaaatactggattatttaatagagtcaacaataattattgaaaagaagaaattcacataaaagcattaagaatatatcacaataagatgatatttttcttaatgctttttgtaattaagcagaatattcttctttacgtacttcaaaaaattcattacgtcgtaagtaattataaattttctctgaaacctcttcttcttcagacactaagaaacgatgatcaaaagcgtagaaagattgacctttaattaattttacgtaatacatattaaatgcctcctgacactaaattattacttgcttcatattatgatggcctatatgtctgctaaaaatacttggagtttcaaaggggataagtaaagggataaaagagcttacaattctgtaaggtttatgtcacctttttcgatagtttgtatttaccaatttcttctataatgcaaataggttacataaaataagggggtaaaaagatggatgaaatacttggagaagttgtagctggtatttgtgaatttgtagtggaagtaacagcggatgctataggaaatttagtttctggaaatgatgaggaaaaagaaacattataataatttgtaaaagaataaagttgatcaaattataaaggctgatttctaaagggaaatcagcttttttattttttacattatattaacttaatttgaatattcatttgttatcatatttaagaagcctatataaggaggtgaataaacaaatatgtcgaattcagggcctgatttatctgtttctcgtttgattgtggtaaatatagaagaaaaagaatatcattttattgttcgtgaacatccgattgtagggaaatttatatcgctatttgaaaatgggaaagaatacggtttaatagataaacaaatcgctaataaagataaatttattacatcggagcttactaagttagattattttaatatagatgttttatatcttacacctgggtggatatggattggtatggatcaatttggtttacatgctcgtgaggctacttataacgaagtagatgttattatgaagttgaaagaggatttatattatatagatatatacgaagaaataaaaatgtagtaaatatttattcaggttaggggggaagttcccatagccttttttttgtttaataataaaatgcaaaattatattattttaatgaaaggtaaatatgataagaagtgagatgaaaagaggatttgaaaatacattaagagaattgtaataattatatgagtcgtatatgtaaataacaatagaaagaagatgataatatgagtaaagaagagcttgtgaaaaaacagtttggcagcaatgcagataaatatataaatagtaaaatacatgctaaaggactggatttacaatatgtagttcaacaagttgagtctcgtcataataatcgtcttcttgatgttgctactggtggcgggcatgtggcaaatatgttagcacctatgtttgaagaagtagttgcacttgatttaacagaacagatgttagaaaaagcaaaagtttttataaagcagaatggtcatgaaaatgtatcttttgtagcaggaaatgcagagaatttaccatttgcagaccatttttttgatacaattacatgccggattgcagcccatcattttacgagtccggctcaatttatttatgaagtaaatcgtacgttggagaataatggattattcatcttaatagataatgtttcgccagaaaataatgaatatgatacattttataattttatagaaaaaaagcgtgacccaagtcatgaacgagctctaaaaaagacagaatggcttactttattagaaaaaaacggtttgcaaatgcagtcatgtcttacttttgataagaagtttgattttgactggtggtgtaatatgatggatgtccctttacaaaagcgtgaaaaattaacagaatgtatgatgaaagcaccaaacgaaatgaagggatattttaatattcaatttaaaaataataaagtagaatcgttctatactgaaatggctatgtttatatgtaaaaaaagtacaacgttaaaaagataaagataaatgtgttgcagtctttctgaagtacgatatacttagtacagagaaactgagaattgaggaatagttataatgattcgtgtacgcattgaaggtactgaggaagaaatgcttgaatttatggggaaaatgccagacattcctggatttgaaaagacacatatgagagagccgagaaaaggaaataacccgaaatacgattcaagtaaaaatgtacttgcatatttgtcttataaaaagattgaagtcgccaataaataggcggctcttttagtttgcgctgtttcaccgccttgtctttttcacataataataatagtagattatgctcaagaggggtgagaatagttaataagaaaattatcttttttggagactttggtattgatgacgccgtagcgttaatttatgcaaataaaacatgtaaattagatattttaggtattgttgctgagtatgggaatgtatcacgagatatcgttacggaaaatgtttattttttagaaaggtattatgctacacaagtgaaaattattgaaggtgcgagtagaccgatgacagctgaagagcctttgtttttccctgaaatccacggggatcacggtttaggtcctattattccacctgagatgagaatttgtaaacgagaaaatttttgtgaattaatcaaattaatcgaaccttgtccagaagatattataattgtggcgacagggagactaacgacgcttgctacgttatttttattgtatccaaatataatggatcgtatttgttcgtattatataatgggcggcgctttcctatttccaggtaatgttacaccagtatctgaagcgaatttttatggtgatccaattgcagtaaatattgttatgaaatatgcgaaaaacgctagcatatacccgttaaatgtaacacagggcgcgcttataacacctgaaatggccaatataatagataaacaaggaactggacaggcgaaactcattaaaccaatgattgatttttattatgagaacttttataaaaaagaatatccgggtattggtgggagtcctatacacgatttattaccgtttatctcgtttataaatgacagtattttcgaatataaaaaatcggcagtgtggattagtacgacaaatgatgtgactaggggccaaagtgtagcagactttagaaaaatagctgagccaacaaggtttgatgatcggccgattcaaagaattgctgttggttttaactatgcagcttttaaagaagagtttatgcgaacaatattgaagccagattgtccttaatgtgtgtaataacaagtcggataaatcgttagttcaaaaaaaggtttaatctgtgtgtattattctcaaaaatcttaaagttgaacaacatgaataacttatgaaaaatgtcacataactaatggtaagcaattgtttctaattatattttgattggtgaaatgtaaaggaggttattatatgatttggtctttaatcgtcggtggtatattagggtggcttgcgagcttaattactggaaaggacgtacctggtggtgtaataggtaatattattgctggtattatcggttcttgggttggttcgaaattacttggtagttttggtccagtcattggcggatatgcaattattccagctttaatcggtgcgatcattttaattttcatcgtaagcttcttattacgagcaatgcgaaaatgaatgtaaggactgtttacatttgtaagcagtcctttttatatgttatgctagtattatacaatcaggaggtgtcagcattgaaaacattcacagtaaatttccatcaagaagataatgctaaagcgacaacagtacataaattaagtgaagaggactttaacaaagcaacagaaaaaggcactcgtcatctatttgatttagatacaaacgttggattcttcgtattctttgacgcagaagatgcagaaggaaacgatcaatacttaatgttacaatacgaaggtgatcatgaagagccaactgcgtgctacggatttgatttaaaactatactatcaatttttagcactgtacttaaacgatcttgagttccaaggtgaaacagatgaggaagaggaagaatacggtccaattcatcatttagcgcatttactttatcatattgttgaagatggtaaatcaatcgaagtgtaatatacatatttgaagctgccctttttgggcagcttttttatatgacattggaatggtgtactgtgagctaaataaagtgaaactttaatcagtggggggtgttcatccccactgattatcagccctcaccaatcgggcttttacggacagtagggcccccacctaacttctttgtttccgctgaattttgaggtggggatcttactgcccggcaaatagcgggataaattaataatagaaatttatttattactttcatgttagcatcgtaaaacacctgttataatgattgtaattaaattcatggaggctaattctatgcttgtagatgtaaaagcttttattaaagctgcaggtttaacatgtatttcattattaagtggagataacacgtttgcttataattttgaaactgtaaaaaatactatcgctacattttttaagaagctaagatttaccgtataattttatttcaatcagtaggaaaagagtaatcacttcctactgttttttttctgtttcaaggagctgttgtgagagcatgttttaagttatagatagaggatattatcattgagaagagaaggtttaaataaggagatgaaaatggtttcgtttatcaagaggtagttacttcggatataacagacttggttactttttagaaacagcttttgtaatatgttttgtacaagcttttggagagagtgaagcactgactttttggaacaaacataatttgaaaagtaatgtaatgggttggttaacgaaatgaataagatgcaatagggggtaaaaatgatgaaaatatatttaaaaatagttatgttatttttggtgtttacatgtatgtttgcgctagtcgcatgtaaagggacagacgaaaaaaaggaaacaaatccaacctcggaaaataataaaaatgaacaaagtaatttttcagaagaacagaaaaatcctgaagcaaaaccaagcaatgaaaaaacaacaaaaccatcgcctgacccagattcgaaaaatagaacacttaatcaaaaatcaattaaccacgttaaagatttgtttgaactcgcaaaagaaggaaaagtacctaatgtaccatttggagcccatacaggggatattgaagaaattgaaaaagcgtgggggaaagcaaataaaaccgaatatgcagggaacggaatgtacgcaacttttacaaataaaaatattgttttcggatttaataaagggtcacaagtttttgatgtacgctcatatcatgcagaactaaaattgattacattacaagaaattgaaaaagcattaggaaaaccatcttcagttaaagagaatggtgaagataaaatatatgtatacaaagtaaataaccagtatgagctgaaatttgtcattccaaaatcgactggtaaggtagatcatatttctgtattttcaccagaggatagtattaataaaatggcaggataagaaattaagtgatttcaaaaacacctcactttccttaagtgaggtgtttttagttgtaaataaggaacgtctcctgccatataaaacatactttcatacgcgaaatacttcacttttgttttttaatattcatccaataagaaatattgatctactgaaaaagtagtaacctataaattatgtgtaggctggttcatgatttttttacgttctaaattttgaacaaacagtgcttgaacaatacctccaattaataagaaactagcacaaatataaaacagcatacttccatttaacttacttaataaaactgcacccataactggtccgcacgttcgagatatatcccagtgtataccgtaaattgaaaaatataaaccacgtttattgtgaggtgcaatttctgaaacgaatcgtaataagtggtttagagcaatactttctccaatgactaaaaagagtaaggtgaagaataacgacaatatcgtcgttgaagaactaaagccaactgcagctattgtatagcaggcgtaagaaataaggatgattttcgccatagaaaatcgttcagaccattttacgaggaagatttgtagtatgatttccaaaatggctttgcatgttgaaataaatgcgagtatgaataagagattaggaaatacatgttctgcaaaaatacgataattcgtctcagtttgtgcataaaaaaagctaataggaagtgtagaaaccataagaccgaatatggcataatgtttaaaaataaattgctttggtgaacttgcctcaactgtttgtttcgacttactcataggtggaacggtttctgggagctgggtccaaacaacaacggcatatatcgtaagggttacactttgcacgataaataaatattctgggtgagtattataaaaacatgcaccgattaaagggccgattacggatccaattgctcccatcgtttgtaggagagcaaaaatttctgcttgctgctcttgttttgttaaatcagcaatttgtgcacgctgagctggaatgtataaggaacggccaataccattaatgacatataacagtgcaaatataaaaacagattgagcgaaaacgaaactgccgattgcaacaccttgtagtaataatccgagtaacataatcttttttcggccatatttatcagtaattcctccagcaataagtgtaaataaaatgtctgaaagtggctgtaatccgaaaattagcatagttattattacattgccgtttaacattttattgacgtaaataatcataatgagagctaacatagattcagtcgttcgggttaataattcaccacacaatctaataaaaataggtttattgtaacgaagtaagagataattcaatattaattcctcctttctatattgaaatgataagatgaaaggagagttggaaaaagggtagagactatagggaggatttttcaccttttagggggagtatgatgtttattttagatcaatacattgaactatggattgcttatggaaaaggaaaaaaagagggagaacgattggaagtaacagtgcaaaatatatctggtacattattttgtacagagcgcaatagtaaattaattataaaaaaattagatgagttaaattggatcaagtggtttccaggtcgcggcagaggaaatcggtctaagttaatatttcaaaagcacccgatgtctttaattttagatagaggaaaagaaataatgaaaaaaggggatgtgaaaagcggaagtatatttgtggaacgctatagctcacattttccatcagtaaagggagaatatcattcctgggtggattcaatatttggtcataaggttgaaatgacatctgaagggagaagagatgtactccggttgcaagtacaaatgaatttagatatcacattagatcctgtatacgctacaatgcgctcagaatgccatatggtaaaacatatattcgacacactcgtgtatgtagacggtaatacaaacattatagagccaagacttgcatttcactgggaatataatgacgctgaaaaaatatggacgttttacttacgaaaaggagttcactttcataatggaaaacaacttactgcacatgatgttatatactcgttgaatagatttataaagctggaaaataatgcacacgcatggatgttacaacacgttgaaagtatccgttcagtggatgactacgttttcgaaattcaattacatacagaaaatcgaatgtttttacatatgctaagtgcagaacagtgttctatcgtgaatgaagatgaagcaggagggctaattggaaccgggccttttcaattatataaaagtaatgaaaatctgttcattttagaaggacatcctttatattttcgtgaaagaccttttttagatcgtgttgagttgtggaatgtagaacaaggtgtaggtacatacgatgttttagtaaaggcgcagtataaagataaagaaaaacataataaagaattgtctcggcttgagtcgaacgtgacatatataacatgtaatcttacgaaagaaggaccaatgcaagatgagttatttcggaaagcgttatataacatcattcatggttatacaatcgttcaagaactcggcagagaacgtggagaagtggcaaaaaaactaatattagcaggtgaaagcattgtagagattgaggaagatgtagaaagtttaattaaaaggagtacttatcataatgaagtgctacaactctacacatttacaggacgagatcatgttgaagatgcacagtggatacaaaaagagtgtgcgaaatatgggattcgtgtagaaaataattttcttgatatagaagagctattggaagtaagtacgatacaaaaggccgatatgatgcatgatagtgccacaatcagtgaacgaatagaagatagtctattatatatgtttcttacaaaaaatagttttattcatggacaaagcagcatggactttcatgaaaagttgtctccttattttagacaagaagaattagagaaaagagttgcactgttacgcgatatcgaggatactttgttacgtcaaattcatattattcctttatatcgtaataaacaagaggtaagtacacatgaaaaagttcaaaatataatgattaattcacaaggttggattgatttttataatatttggtttaagtcttgatatataagggcttttgcacattttcataaggtgtgtaagagccttttttgtatgtaggaataggtttgttttacacattgttacgctacttgtgataaaagtctatttacagcgtaacagtgttatgttacattgttatcaggaaggagtgttatagagttgagtacagatttaatttcaaaaaaagatttattagaactaactggtatttcatacggacagttatataggtggaaaagaaaaaatttaattccggaagattggtttgtacgaaaatcaacgtttacaggtcaagagacattttttccgaaagaaaagatattagagcgtatcgataaaatccaaacgatgaaagaggatttatcacttgatgaactagcgaacatgttttcgccgagtgtgagagaaattcttttaacaaaggaagacattttatgcaaggggattgcatcagaaccagttttacaatttttcatagaacaaacgaataaaagagcagagtttcaatttgtagatattctttatgtgtacatgttagaagaattactgcaatcaggagagattagtttagaagaaggaaaaatggtcttgcaagttttacgtgaaaattatgaagcaattaaacataaaacttgtgacttaattattgtccgaaagttagggatttctacatgtttattagtctcaaacgtggacgatttaatttttgaaaaaggcaccaaaatcgttttacgcgaagcgattatgaaatataccgaagcattaaaaactaaattgttgtagtggaggagaaagtatgcgtacagataatttgattataaatggttacggttcatcgaatggtggcgagtttcataaagtgcaattaaacggaaaaggaactgtgaatggaaatgttgaatgtgagcaatttgaatgtaacggttacggtgcagttactggcgatttgaaaagtagcagtgcacgaattagcggatctggtaaagttgatggcacagttcaagctgaaacgatgcgaattgatggaaaagcaacaattacgcaaaatgtaaaagcaaacagtttgaaaattgcaggaaaaggtacgataggtggaaatgtcactggtgaagaatttaaagtcaatggtcaagctacaattgacggtaattgtgaagtggatactttttcttcagaaggacaatttacaatcggtggtttattaagcgcagatgaaattaatataaatattcacggtacatgtcgagcgaaagaaattggtggtcaaacgattaaagtaagacatagatcaggtacatttagtagactatttaaaacagtgtttggcttgcagttagaagctgaactattagaaggtgacaatatcgatattgattatgctcacataagaacggtaagaggaaacaatgttacagtaggagcaaactgtgagattgaactgattgaatataccggtgttcttactgttgataaaaatgcaaatgtaaaagaaattaagcaggtttaacggaagggagaaatcagtatggaacatccacatagtctcacagtaaatggttctggtaattcagcaggcggagattataataaagtgaagattcgcggtgaaggaacaattacgaatgatatgagttgcaatgagtttaaaacgtacggaacgagtgatgtacgcggtaatgtgaaagtgaaaaactatgtcgtgtatggagataacgaagtacaaggaaatgtagatgcggaatatgtaaaagtatatggtaatacacaaattcatggtgatgctcatattgaaaaaacaaaagttagaggtatgatagatattgaaggaaagttttcaggtgatttcgtagatgtaaaaggtgctttaaatgtaaagggagatattgaagtagaagatttatcattaactggtggtcttgaaagtgatggattacttaatgctgaaaatattcaaatctcacttcgttatgaaggcagtaaggtaagagaaattggtggtaaaaaaattaccgttcgtaaaaaagcgagatttattccttttactagtcatgctggaaacctccaaacttcaattgttgaaggagatgatatctatttagaacatacgattgctgaagttgtaagaggcaacaacgtcacaattggtcctggatgtgaaattagtgttgtagaatatcatactagttttaatcaaaaaggtaatgcagtcgtaaaagaacataaacaaatataagtagtatgagggagagcaagagatatggttgagaagaataataagctcggctttgttgtggcgggcttattgctaggtattttaatggcatcgatggataataccattgtcgtaacggcgatgggaacaatcgttggtgacttaggaggcctcgaaaactttgtatgggtcgtttctgcctatatggtcgcagaaatggcaggcatgcctattttcggtaagctatcagatatgtatggtagaaagagattctttattttcggtttaattgtctttatgattggttcggcactttgtggtactgctgaaaatattacacagttaggtatttatcgtgccattcaaggtattggcggcggggcattagtgccgatcgcgtttactatcgtttttgatatttttccacctgaaaaacgcgggaaaatgggtggtttattcggagctgtatttggattatctagtattttcgggccattacttggcgcatatattaccgattatattagctggcactgggtattttatattaacttaccacttggcattttagcacttatttttattacattcttttataaagaatcacgcgttcatagaaagcaaaagattgattggtttggcgcaattactttagttggtgcagtagtttctttaatgtttgcgcttgaactaggcggacaaaaatatgattgggattctagctttattttaagtttatttggtggattcgctattttaatcatcgcattcatttttattgaacgaaaagtagaagaaccaattatttcatttgagatgtttaagcagcgcttattcggaatgagtacaattattgcattatgttacggtgctgcatttatgtcagcaactgtttacattccgttattcattcaaggtgtatacggcgggactgcaacaaactcaggattattacttttacctatgatgctaggatcagtcgtaacagcgcagttaggtggatttttaacgactaagctgagctaccgaaacattatgattatttctgctgttattatgttaatcggattattcttattaagtacattaacgccagaaacaagtcgtgcattattaacggtttatatgattattatcggatttggagtaggtttctcattctctgtactaagtatggcttcaattcataacttcggtatggaacagcgtggatctgcgacttcaacgagtaacttcattcgttcattaggaatgacactaggtattacaatcttcggaatgatccaaagaacaggtttccaagatcaattagaagaagcatttaaagggatgagcgggggaatgaatacaaaattaggggattcaagagccattttatcagaatcggcaagatctcaaatccctccgcaaatattagataagattattgacgctctttctagttcaattgttcaaacattcatgtgggcattggtaccagctggattagcattcatattcattttctttatgggaaatgagcgtatggtaattaagaaagaacaaatgaataaaaagagtgaaacatcaaaagcgtaatgaaaaatctcctttccaattggaaaggagatttttcgtatgtacggtgttagattagccttcgataatttcgtattcttcgtctgcaagtaataaaatttgcgttttcttgcctttgttttgaacttcgattacatcgtatgcgcctaagtctcttactttgctttgagaagcgttaaccataacttcaatagaatcaattaagatatcttcttcaatatatgattcaggcaatgccatatcttcagtatctaatacacacgcatatagattttgtaaattttcagtagttgggttttgttcctcaacatcaatgatattttttactgcatccatattttcttcttttgcttggtacactttaattttagccataattttaatctcctttataacgtaatcgtagaggctacacctcattataacgttttttttatgaaagatgaaattgttatatgtatttatagtaaaaattatgtgtccttactcaaaattggtgtgatttccatataaatgtacgagtaggtaacgataatgttacgttaaagttatattgtccaagcttttcttattttcttcctatatatatgtagtagcaattctatatagagaagggatggagtgtaagtgggttgtgaaccgagagtttctagagattttgttcaagtacctgaactggtaggttttcgattacttttatcacatccagctggagaccctttaaactacggattattatttattaattttcctgatacgatttttatttttatattggcatcaagcggataccttgccatttcgaactgtttaaaaatagagggcggaactggtgatgccgaaatagaagagatgaaaaaatgatagaggatgacgataatacgtacaagtcagttgttaaattgactaaagtatataagaacggtgagacggaatcttttatttataaaaatgagttataatacatgtatttaaatgaaccctcaaactattgttgagggttgttacataattaattatgttgatcctttaagccatttgttaacgagtaagaaatatatttattgttgacttattttataggttgatcatttcatagttagtagatgttataatcattttatgtttactgatattttataaatattcgaagtttcaatttaatagtcaattgcttttatgatgaacaggtgggtgtgtatatgaatacgaattatggagcgctcatgaaaatgttaagagtggttgattctaaagaaggcgggaatgtaaatgatatatgaagcgaatatacatacaagaaaaaaactagtttctatgtttgaggatttcaataacgttgttttactttcttatttacaagggcatatgggtactgcttgggtaaatgatcttgaaaatccaacagtagcacaagttatggtaggaatttttacattttacgctggagacccaaatacgaaagaaacagaagagttattacgtaatattccagaaagaattttagttatcgtaaatagtgaagagtggaaacaacgcttagaaacattccatgaaagaaaaatagataagtttttacgttataaattcaaacgaaatccagaagtttttaatcgttcaaaattacaatcttttatatcagcacttccaaaagaatatgagttaagaagaatagatgagcatatcgcaaatagccccaaattacataagatatctgaagattttacaagtcaatttcattcgatagaagattatataaaccgtggtataggttatagcattttatataatggagaagttgtatgcggtgcatcctcctatagtatttataatgatgggattgaaattgaagttgcgactgatcacaatcatagaagagagggcttggcaactgtagttagtgcagctattatattggattgcttagaaaatggaaagtatccaaactgggacgcagcgaatactacatctgctaaactagcagaaaagttaggatatgaatttgataaggcatatgatacttattttgtagataatagatgagtgaaggagttacatactaaaaaatacatgcgccctagtacgtaagtctagggcgcatgtattagttggtaaatatcttcataacaattttatcacattttatcttttgaatgtttggaattaaagatatttatgtgactttttgaaaaaataaaagagcagttagcaaaagctaactgctcttctccaagggggaatggagaaatacaatcatgttacctatagtattgacagaacattgagttttaatcagccatttataaaaggagagataaaatatctttgattaatctttagctcccattaggagtactgatagaaaaacgattgagaatatatttttttattacatttacaatttgaagagtagaacgtgtttatcgtaattctccaaacaccaattatatttttttagaatgattggatggactgcttctttcgtagtatcgacttcagtatatccatatttcttataaaagttttctaattcctcaaaaggaagacaatatacattttgtatttgtgatttttttgcagtttctactaaaaatgaaacaagctcaccagctaattgtagccctctaaattgaggcagaataaaaattccgcccatttctaaagtatcttcatctatttggactaatcggccaacgcctgcatactcgttgttatatgtaataattgcaactttatctctctttaaatcactccgtacaaatcctattgagtcatattgattattaacccattctaaatcgttagatgtagccaattgaatactcatatacatcctccttggaaatactagcgctctcttcattatatagaacataagatactatatcaaaagaaccttgagatagcacatttgtttaagttattagttaaaagtgtgggattgctggcattgaaatgatggcttcaccaaacataggataataatcttgtgaatttagtgttacatagtcaaaataaaaattagtttatgtgttcggtaacgcaagattgtttaagtgtagagaaaatcatagggttattttaattagtagctactgtattcattgaagctattaaggaaacgtggtaatcgccagccctagtgatacaaatcatattaggatttagtaaaaaaaattcttcctgaaaaagagggggattaaagataagagcacttcgaaaagtgcccttcagtaacgactacttattctaaaaagaaaggatgcaatatatcatatgaagtttagtgtatttaagtatgggtcttttatataaatgtgaaataaaagagggttgtcttcttattagaaggcagctttttgttattacaaaaaagaattagaaataaaatataaattcagttacttgtccaaacaatttttttgaaaatacataaaatgctagtagttagccaatatttttatattgttaattttttagactaaaaggggtgattttatgtgtgattgtgaagtttgtagaagaaagaaaaaacgtgatccattaaatcggggttctgaaccaaaaaaacaggattccgaatcagtaaattcttattcatttagtaaaaatgcaaattttttagaagaagctatacaaacagatgaaatcgatcaagtttctgaggaatatattgaaatagtagattcagcagatgtacaagttactactacagatacaaaagctgcactatctatccaagccgcgttacaagcagctattgtggttgtagtaagtatttctatagcagatagtgaaaaggcagataaaataacacaagaattgtttcaaaaatcatctattaaacaaattaatagacaaaaaacatttattaaaaattccagaaacgtaaccgtaacaactactgatacagatattgcagtgaatattcaaattcttcttcaaattttattagcgttattagttaaactaaacattttataaagtgtctatcctatttatatttagctataagggttcactctaagtaaatattttttgttgtaatatgtggtacaagcttggactttctcattatgactgaattaatattcaaaattgatgggaaattaagtgtggaaaactacacaataacaaaggtgaacctattatttaacagtgaataaaacttatatatgtgaagtaaaggaaagctgtcttcgtattagaagacagctttttgattttattagtaaaaagccgtgaaaataaaagattaagttacttgtccaagcattttttatttaaatacatataatgctggtagttaatctaaatttttatagaaaactgataggagtgaatattgtaaatggatgatttaaataaattttcttcctttaagtttgataaggatcaaaagaatataattatagaccttttactctcagatatttttaataggcatgggataaatgaagaaaaactaaaaaatttatcaccagaaaaaaagcagcaaattaaaagtattgtttctgaaatacaatcacaagttaataattatttagattgaaagggggtgaatgtatgaaaaaaacatgtcattcagaggaaaataaaaggtggagtgcattagactcctcaaatcctcatccatcttttaaaaatgctactgtttcagaagctgcagcacaagaaagtaaaacttaccaaatttctgaagaatctattacaattgtagattcagcagatgtagaagttacgactacagatacaaaagctgcgttatctattcaagctgcattacaagcagctatcgtggttataataagtatttctatagcagatagtgaaaaagctgaccgtgtagcacaagaattgtttcaaaaatcatctattaaacaaattaataaacaagaaactgttattagaaattctagaaatgttacagttacgactacagatacagacatagcagtaaatgttcaaattcttctccaaattttattagctttactagtaaaattaaatattttataaaatgtttaaccttctttagatatagtgcatcttacaggtaaatattcactgttttaattatagtacaggctataaatatttatcataactggattaatattcaacatcaccaaagtatgaatgtaaacaaacaatgtgatggaaaataaagtttggttattttatgaaaattgaaaagccatttcctttattggatttggcttttcaattttaaacagtatgaatttgaaaagataatattaagctaaagaagtaaaatatactgatacaaaatacttataaaattactcgtgttatagaaaaataataagaaaaaggtgtttaaaatagaatcattttcattaatagttcaagttttgaagaatagtgcatacaatataaagtgttttcctttcttcatttaagttttacgtatataatttaaaagtactatttttattttattattttatatttataacagaatagaggtttaaaaatgagtgttaaaatcattacggatagtgcggcggatttaccagtagaattgctgcaagcatatgatattgatttaattccactccgtgtatatgatgaagcagaaacagagtatttagatggagtaacattagagtcagttacattattacaaaaaatgagagaaggcgctgtttatagaacatcattgccttcacttgaaactttccaagaaaaatttgtttcttatgcaaaagaaggtaatccttgtatatatttagctttttcatctgaactgtctggtacatatcaatcatcagttgtcattaaagaggaagtaaaagaaacatatgcagatttagatttagaaattattgatacaaaatgtgcttcgcttggtcaaggtcttgtcgttttagaagctgctaaaatggcaaaagacggcgcaccaaaagaagatattttaaaccgtgtcgcttttctaatgaaccatatggagcacatcttcactgtagctgacttacagtaccttgttagaggtggacgtttaagtaaagtagctggttttatcggtggtttactaaacattaagcctatcttaaacgtggaagaaggaaaacttgtaccacttgaaaaggtaagagggaaaaagaaagtattaagccgaattgttgatattatggaagagcgtggtaaagaccttaaaggtcaaacaatcggtatcactcatggtgatgacttagaaacagcggaagcattaaaatcattaattacggaaagattcggttgtgaagtatttatcgtaaatacaattggtgcagcaatcggagcacatacaggacctggcgttataacgttatttttcttaaatgaagtagagtaaaggattgatcatttgatcaatccttttttctttaatctgtgattaccggtcgatatggtattggtgaagataaaatctttgaagttttcctatatgaattgctctcttgtagagggagtattttttatatgtggaatgatacttaatggtagaagaaaagagtataaataagaatgtatttgtaggaatttaaatatttgaagatatcaaaattttgccatttcatatataattgtgtggggagaaatatctgtaactatttgtaaaaataggaggcgactataaaaatgcaagaaattgctagatgggatttaaatcgcttgtatttgaatgaggatattctatttccaattttggagttgaaagagaaatattttgtaacaaaagatgtagaggttctttcaaagctaatacaagctattgagaaaacagaatactatttgtactgtagatcagttgaagaaagtgtaccatctgaccttactaaattgaccgtgaaagtgaaggaactaaaaaatgaattacagcaagtaataaaacataatgaagtggaaacttcagataatactaagttaataaaagatgagcttaatgcttgggaaaatatgtacatacaattacgggataggatagaaatagagcacaataataaacaattatcctttggacaagcaaatactattgcaatgaatagtgataatgaaaaggaaagattagaagtattcgagttacttacaagtactttacataaggaaaaagaaatctttgctactgtattaaatcaaatagggagattgcgtaatgcaaagagtaatgaaatagaagatagagagattttaacacaatcttttcatgcgaatggcatttcagaaactgtattattccaaatgtggaatgcgacagaagaaaaccttgataaattagtaagtgctttaaacgtgtataagaaaggaaaagcttcaattacatggcatgaacttatgacggtaaaggaaagtaatgagatcatgattcctttttcagtagcaatacaaaacgtttatgatgcatgtaagaatattgatgaagaattagcagaatttgcacgtaatgcgatagaaagtggttgggtagatgctgaaccgagagagaataaaccaccaggtgggttttgtgctccatttttcagtgagaaagaatcgcgaatttccattcgttatgatgggagtatagatagtgtaagagtgctcgctcatgaattaggacatgcttggcatttttataatatgagttttgaacaatctacatcttttttagatgattatttgccaatgagtacggctgaatcagcatctattttctttgaaacggtactcttaaattatctaattgaaacaacggatagtaaagatatgaaaaagtcattacttagctggaaaataagaaatagttttaattatgtaatggcaatacgagcatcgtatcagtttgaaaaaacattttatgaaaaatgtaaagagggtcctttaagtgctgatgaaattgagaaattatctataattgcacaaaaagaagcttatggaaaagctttaagtgaataccagccgtttgtatggatgaaatatattcaattttatatagcagatgttcctttttacaattatccatacacatttggatatttagtaagttttagcttattagaaatagctcaagaaggtaaaagtacttttcattcgaaatataaagagttcttacgagaaacaggaaaggctccagtagaggagcttatgaaaaaacattttgaaatagatataagaaattatgaattttggaataaagcttttattcaaatttctaaagacattgatgaatatttgcagcttatgtaaggggagagtacagtggatcagcagtttataaaaggtatacctttttcaactttagaatatgcaaaagctataagtttattaaaaggttggctacatgaacaacaagagaaaccaaggtttgtagtaactgcaaatcctgaaattgttatgtctgcaaaggaaaatacggaaaaatcaaaggagtttaaaaagatgttactatctgcggatttaataacagcggatgggattggtgtcataattggctcgaaaatattaaaaggaactttgaaagaacgtgttactggggcggatttaactcacgatttaataaaatattgtaacgacaatgaatatcgtgtctttctttttggagctgcgccagaaagtaataaaaaggcattagaaaaattaaatgagcagttcccaggagcacaatttaaaggacagcatggatttgtaaatggtgaagaaatagaagaaataaaaatgaaaattaagcagttcaagccgcatttactactcgtaggactaggttcaccaaaacaagaagagttcatctatgaaaacatacaaacattaaacgttccgctatctattggtatcggaggcatgattgatataatatctggtactgtaaaaagagcaccaaaaataatgagggatactggaactgaatggctgtataggttactctcacagccgaaaagattaaagagacaacttgtacttccgaaatttttattatcggttatgtctgagcggattaaagggattaattaataaaggggactacatacataaacagaatcggcattatcggagcaatgcaaattgaaatagatttacttttaaaaaagctagtaatacaagaagaacagacaattgcgggaatgccattttatattggagaattcatgggaacagaagtaattattacacgttctggtgtagggaaagtaaatgctgctgcatgtgtgcaaacattaattcataaatttaatgtagactctatcatcaatacgggcgttgctggtggattacatccaggtgtaaaagttggcgatttagttatttcaactaacgttacccatcatgattttacatatataaaagaaaataattgttccatttacattgctagtaatggtttgaaagaatatttacgagcaatcgtaacttattatgctttagacaagtgggtgacagaaacgtttagtattgaacaaatacaatcgctaaataaaggtgacttagttaaaagtattatgaaccaatatgatataaaagaggcagcggtagttggtgaccggctatgtgatataaatgcagcgaaagacaacggtttacttgcaattgggtgcaattttgattttgcgcaagaagatgaacttgctcaggctgatgtagtaatagatgatttaatggagttgaaggggatattacctgctgtacagaggtaaataaagtgtgtgcgttttttgccaagtcctatatgtcttagtttatggagggaatatgattaaaaataattttaaaattagtaatattcctgcggttttatggggagataagagtgataaaatttttattgcagtacatggaaatatgtcaaataaggaagatacaattattcaaatattagctgaagaagccaaacaaaaaggttatcaagtattaagctttgatttacctgagcatggagaaagaaaagatgataatacgccttgcaaagtacagatttgtgttagtgaattatctataattatgaattatgcaaaagaacattggaaagaaataaacgtgtttgcatgtagtatgggagcgtattttagccttttagcttatcaaaatgatgtggtagaaaaggcattatttttatcaccagtagttaatatggaacgaattatcgaaaatatgatgaaatggtttaatgtaacaccagagcttttgcaaaaagaaatgactatagagacacctattggtcaaaagttatattgggattatttatgctatgtaaaagaacatccgattaatacatggaatatagatacatatattttgtacggagccaaggatgaactgtgtgaacttgaaactattaactattttacagaaaaacatcgttgtgaattagaagttatggagacgggtgaacattactttcataccgaagaacagttaaagatatttgaacagtggttacacaagcatatcgattaacaaattacaatttattttgaacctgttagagaagaatgagaaatatataaacttatagtatatttgagagaatttataaatggtgaatgtatacacttaaacaaacacatgctttaattcgataagaattaaacaactttaaagagccttatcacacactagattgtagcaaggctcttatattttcataataaaattaatcaactgtattatcgatttacatatgaagtgaagaatacgcacgctataaattacataaagtaacaaccataaaaatgctcagaataaaagattctcgagcatttttatgtattttcatacttagggggaatggacttgaaagatatacatattcaacaaatagaaaatttaatggaatatgaattcagtcatctcgttcaagacagtgaagaagaaggttttaatttccttataaggctaataaatgaatataaaaacaaaataaatgtattcaataaaactggagaatgtttatatggtgttttccaaggtgatatgttaattggagttggaggtttaaatgaggatccgtacacaaaagacaataagattgggcggttaaggagattttatatttcaagggattatcggcgtatagggttagggaacttattattaaaccaactattatgtcatgcggaaaaatattttgaagtgattgttttacatactgacacgaagcaaggggatgtgttttatactgcgaatggatttgtaaaagggggattatataagggatcgagtcactacaaactattatagagattgctatccaaataatagctacgaacaggttttttgttggtaaatcgatatatcttaaaaatcgctgatatatgaagttgcgatccttatattaaaagacaacttttataatttcatttactaaattgttattataaaaaagagcaccttagcttttaaaatttagcttataaggtgactccttttcagtcaattacgttttaacgttcatttgtttcaataataatcctggtttaccttttacataataaaaatgcgggttattttcatcatcataaagcataatataaggcttttcatttagtgggagcagtataagtacttcgtctattgtagtgtgtaaccattgattagtaatagaaaccggcttagataatgggatttttatcatatagccatcttttggaacgacatttaagtttttaaatggaccagtaattgctttagcgtattgaactgcttctttttggactattggatctaaagattgtttttgaatgaccatttctttttgacaatcaaatacttcaatttgttgatttgtatttgcgaacgcatttgttgataatagaaatagaagaagagaaatgaccccgattttttttatcatagtacaacacctcaccattactatcccctcaaaagctttaaatatttttctgtcacattcatgtaacaaagatgttgtatgatacaattggtttttgtttaaaagcaatggaggaaaaaatatgaaagttttaattgcagatgacgaacaagatatgttaaggattttaaaagcttattttgaaaaagaaggctttgaagtattattagcgaaagacggagaggaagcacttcaaatattttatgatgaaaaaattgatttagctattttggattggatgatgccgaaacatagtggtattactgtctgtcaggaaataaaaaagaattcaagcgtaaaagtattaatgcttacggcgaaaagtgaaagtgaagatgaattagcagcgcttcaaagtggggcagatgagtacgtaaaaaaaccatttcatccaggagtactaattacacgagcgaaaaaacttattcagcatgatgatattattcaagtacaagatgtaaagataaatttcgccaaaaataaagtatataaaaatgatatagagttagaaattacaaaaacagagctcgaattaataaaatgctttttaaatcataaaggaactattttaactcgtaaaaaattgttagacattgtatggggatttgactattttggagaagagagaacggttgatacacatgtaagaaggctgcgtaaaaaaattggagaaaatattattaagacgcatcgtgggctgggttatagtttggaggaacaaagtgaataaacttgggaaaaagctatttctcagcatttctttaaccgttattcttatatttacaatttctttattattaattaactttctcttgccgaaatataatatttataaaacacgtgaaaacttaaatgaatttacaactcaaatacaaaatgcgccagtcaatgatttagaagatattattcatacaattgaaagtgaaaataatgttacaattgcgtatacgccaattaatcagtcagaagatgctatgaacgacgcgttacgcatgcaacttacgaaaaagaaagtaacgttaaataagctttggattacgaaagacgaagttatgaaagtgaagacggaagggcaatcgaataaactgtacgatcaaggaaaggtaaaagcgagtttttttgctaaatatattgcgaaagatgatacgataattttaattgggacttccattgcgaattcaaatgaaattataaatacgttaaatacattttacttatatatcctatgtttctcgctccttcttattattttacttgtgtggatactttcaaaaataataacgacaccactgaaagagttaagtgatgtggctcaggatatttcacatttgcagtttaaaagaacgaaagtgaaaacgaatgatgaaataggagagttggccaatagtattaatatcatgagtgaaaaactacatgaagcacatcaagacttaactgatcgtaatgaacatttaaaacgatttatgggtgatgtaacgcatgaattaaagacaccgatcgcattagtaaaagcatactctatggggattaaagatggattagatgatgggacttatgtagatacaattattaaacaaacagatcaaatatcaaacttaattgaagaactattacgattttctaaactagaaagagatattttacaaaaagaagaattccccattgaaccactggtccagagtatattagataagcatcagattgaactggattcgaaagaaattaacttgcaagtaaattgtaatacgggcgatacaatcgtttatgcagatttaaataaaatgagaatggtgtttcaaaatttaatttctaatgcgataaaatatacagcaaatcaaaacataataattacattagaagatagaaataaaagtatatatttccaaataaaaaatggcattcctacggataaaattaaggatatcgagaaaatttgggagcctttttacgtactagaatcttctcgtagtaaagaaaaatcaggtacaggattaggtctagcgatagtgaaaagtattttagaaaggcatggttttgaatatggagtttcctctatagatggagaaattcaattttatataaatgtgaaaaaggactaatgaaaatattagtcctttttgcagctttagagattagcgatacaggatgaatcaccataattttcaaaattgatgtattaaatggagaattagcaaatgttctactttcattaaattcacgtgaagttcacaggaaaacgttatatttacatagttatatttgaatttaatgaagtgaggtattcagatttgaaaagaaagaaattagtaattggtagcattttaatggggatgacgttatctttatctgcatgtggttcatcagataatattgtaacgacaaaatcaggaagcatttcagaaagtgattttaacaaaaaattaaaagaaaactacggtaaacagaatttatctgaaatggtagtagaaaaagtattaaatgataaatataaagttacggatgaagaggtaacgaaacaactaaaagaattaaaagacaagatgggcgataattttaatacatatatggaatctaatggtgtgaaaaatgaagatcagttgaaagagaaattaaagcttacttttgcttttgaaaaagctattaaagcaaccgtaacggaaaaagatattaaagatcattataagccaaagcttcaagttagccatattttagtaaaagatgaaaagacagcaaaagaaattaaagaaaaattaaatagtggcgaagatttcgcggcagtggctaaacaatattcagaggatccaggttctaaagaaaaaggtggggaactatctgaatttggacctggtatgatggtgaaagaatttgaggatgctgcgtataagttagaagttggtcaattgagtgaacctgttaaatcttctttcggatatcatattattaagctaacggataaaaaagagcttaaaccgtatgaggaagagaaagagaatattcgtaaagaattagaacagcaacgtatacaagatcctcaattccatcaacaagttactagagaactgcttaaaaatgcagatataaaggtatctgataaagacttgaaagatacctttaaagagttagaaaaataataaatggaatgtaaggcaagcgatagaaatatcggttgtctttttctctatttatcccgctatttgccgggcagtaagaccccacctcaaaattcagcgaaagcaaagaagtggccctgctgatcgtaaacgcccaattggtgagggctgattaaagtttcactttataaagaaggaggaagtgggaaaatactttcatacctgcattaaattttacttaataagaaatctttgagtttctcaacttttatataaaataaaactgaattttcagttattttgttatatagtaaaagagaacgaataaggggagggaacattttgagtaaaaagaaaatggcaattacactgtcagcaatgctatctgcaacaattatacctagctttactatggatgtgcatgcagagaagaaggaagagactaaaagtacaaaaattgaattagaaaatgggatgacaaaaccgatttattctctcgatgaagctattatcgaaaatttatatgtagagacagaagttgatagtgatcgagacggtaagaaagacagagtatcgataaaagttatgcgtccaaagacagatccgaatgtgaaagttcctgttatttatgaaatgagtccatatcgatctggattaaaagatgttcctgtatataatgtagatgaagaattgtatgcgtatgaaggaaaaccgtatggagcggttaatcttggttcgtatgggaactattacgtgccaagaggttatgcagttattctaggcgaaagtatcggtactggaaaatcagatggatgccctacaactggagatgaacaagagatactcgggacaaaatctgttattgattgggtaaacggtcgcgcgaaagcatttacagaacagggtgaggaagttcaggcaaattggtctacaggaaatgtaggtatgactggagtttcctataatggtactttaccaaatgctgttgcgactactggagtcgaaggtttaaaaacaattattccaatcgcagcaattagtagttggtatgattattatcgtgcaaatggtgcagtcattgctccaggcggatatcaaggggaagatacagataatatggcagaagcagtactgacaagggaaaaccctgaagtttgcggacaagttataaaagagttaacggctggacaagaccgaaaaacaggtaattataatgatttttgggataaacgtaactatgtaaaagatgctaaaaatgtaaaagcgagtgtatttgttgttcatggtttaaacgattggaatgttaaaacaaaacagttcgcgcaatggtgggaagcacttggagaaaataatgttccgcgtaaaatgtggctacaccaaggtggtcatggtgggacatcaagtaataactggcagcaaacacaaaataaatggttagattattggttgtacggaattgaaaatggaattatgaatgaaccaatggttgatgtgcaacgagaaaataaaacgtggcaaaagataaaaaattggccagatccagcggctgtaccttcaaaaatccgtatgtatttaagtaataaatcagtcaatttaccattaagtatgggagcggctaataaagttttctcattcttagatgatgcacaaatgaaatcaaaccaattagtagcaaacccagaattagaagtagcaaatcgattagtatatacaatgcctgtactgcaaaaagatacgcgtataagtggtacaccaaagatttcaattacaggaaatattgatcgatctgtatcaaatttaacagcattacttgttgactatggaggagcgaagccggaaatcgtaacgagaggctggatggatccacaaaacttaaagagtatagaaaattcaacagcgattcaaccgggcaaagattatacatttacatgggacatgcagccagatgattatgtatttaaagcggggcatcaaatcggagttgttttaattgcaagtgattatgattatacaattaggccgaaagctggcacgaaacttacagtgaaattaagtgaagtgacattgccgattgtgaaataaatattttttctaaagagcttactaaagtaagctctttaatttgtagtctgaatttttaatttttatatttcaaattggaaggttatgtaatacaatatcattatattctatggaaagtgagtgatatattatgacagttagctctttcgaaatatcattaaaatcagaggtgcaggaagattagttgaattgaaatcttccgtacgtaaaaacggaggagaaaataaatgtttagcttttatagtacactttgtacagaactgtatgattacacaaaaccagtcggttattctttaaatggtgatattgagtattacaaaaaacggttaaaagattgtagaggaagaatcctcgaagccgcagtaggttcaggacgtgtcatcattccgcttctagaggctggttttaaagtggatgggatagattattcacctgaaatgctagattcttgccgtaagcgctgtaaagagagaggcttacatcctaatttatatgaaggaagcttgcaacaattttcacttccgcataaatatgacgcaattatcattcctactggatctttttgtttaattgaaaatcgtgtggattctataaatgcattgaaatgtttttatgaacatcttaatccagatggacgattaatcgtagatattatgcttccgtatgactggaagactggggaaattcatacatcgactttctctttgccgagtggagacggaatcacattagaaaataaatcaattgaaatagattggctgaaccaagttactgtatcatatttgaaatatgaaaagtggagtaaaggacagttagtacaaacagaactacaacgctttgcgctgcgctggtatggaatagaagagtttaaacttcttttagaaagtataggtttctctaatattacgtgctctgctgaatatgattatgaaaaagaaccgtcaaatgcaaatcaaatgattacttttgaagctgtgcgaaaagaatagaactaaaactatgaataaaaaataaggcaatcgatttaaaatcggctgccttattttttattttatgtaatggtttatagagaaagattggagggaaataaatgaaacttatattaatatttggcccacaagcagttggaaaaatgacagtggggcaagaattagcaacattaaccggtttaaaactttttcataaccacatgacaattgatttagtaagtccaatttttgattacagtacgaaagaagcaaaaagactagtaagtttatttcgtaatgaaatatttgaagaagtatctaaaagtgatttatctggaatgatttttacgtatatatgggcatttgacctccaagcggattgggattatatacatcatgtagaaagtatttttgaatcaaaaggtgggacagtgcattttgtagagctggaagcggaattagatgaaagattagaacgaaataaaagcccgaatagattagaacataaaccgaaaaaaagagatattgagtggtctgaaaataatttgaaagaaacgatgaaaaagcatagattaaactctcttcatggtgaaattgaaaaagaagagtatataaaaattaataacacgtatttgagtgcaaaagaagtagcggaaatgattaaagagaagtttcaattgtgaaatttttgaagtctatttcgttttcgttgtccaagcattctcctactaattacatatactatttatgttaaagtcggctactattttatatagggctgttattttcctataaatgctattttagtgaagtgggaggaatcaatttggaaaacgtagaacaagatagaattgaaaatcaagtgtattcaaatcgtgtagtaagatcagaatttgattcgaattgggaaacttgtatatcaaagagtggttatgtaatttatgtagcaacaagtaataatgctgaagtaatagtgcttcttgcagatggttcaagtaaattattaattttcgaaaaaggcggtaaagtagtagttggtggcggtggaacaagtcattacagtaagccgcatattgcaagaaatatttaagatagaacatgttaattaagaagaagctggaaaacggttgtcattcatgtttagggcatgatagacgaaccgttttttatttgtttataaatttagaagaacttcattgattacaaatacatcaggatgagcagcgaaattagaagaaaacttggtgggtaatggtacaaaatattatgtaggtttgcaagaatcttataagcgatataaaaaagcatttcctatttggggaaacactacttctatgttatagtataatagtgtttttagatggtgctattttaatatatttataattttgttatgtattatttttatattaaataagcgtctaaagtattttttgatataaggagtaataattagagaaatgaaaaatatagactttatactagaaagtgatgaggcattaaaaccgtctgaacgattagtactattattattagagaagcatagaatgctatatacgaacgatctattggcattatcaaatttatcatataaaacattaacagattcattaacggcgctagttttaaaatcgtatgtgttaaaggaaacgggtaagggaagaagacagaactgctatagattagtatgataaggcagctgttttagagacttttacatatgttttttcaatcgtaaggtggaagtgtgttttttgttttcaaacgaaaaaattactataagaggggttaagatagtagcgtttcatttttgtaaatgtaattatttcatcattgaaaatacaaaaatgaaataaacagtataaaaaagaaataaaaaaacaatccattttaaaaagggattgtttttttattggaataatattatttgatatgttgaaagcatgaatagcagaatagacattacctgttttattttatgcaaatgaacaaatatgatgaaaactatgtgtatagttttttgcttgctttttcagtaactctaatgaaattatggtcttcattgtttaaaggcagtatttttaacattattgctattcagcattaagcacaaaaaagtaatatatataatattattatgtaaacttaagattttaaaaggaaaatataataattaatagaacatgtagaaggagatgcttaaatattttgaaggatgggagattattatggagcatttacaatcaatagcacaagctgttataagtggtaataaggaaaaagtagtgaagtttataaaggcgagtccaagcattgttaacgaatgtagtgaagatggctggacaccacttcatttagcagcttattttggacagaaagaaatagcgagttttcttttagaaagcggtgcagatatacatagtagagcgaaaaatgaaaatgaaaatacacctttgcaagcggcaattgcgaacaagcaaagtgaacttgtcgctttcttaattgaaaaaggatcagatgtaaatattatgcaaagtggtggctggacaggactccacgaagcagcattattaggaaatgaagaaataattatgttgctccttaaaaatggagctaataagatgattaagaaaaatgatgggaaaacagcgtatgatattgcattagaaaaaggatataatcaccttttacatcatttgaaacaggaagtgaacttatgatgaataaatggagtgttggtatatttttatttaatgaagtagaagtgttagactttgcagggccatttgaagttttttctgtaactgaggtgaatgaagaaaaaacatttactgtttatacagttagcgagaatggggaaatgattacagcaaggaatggattgaaggtacagccagattatagtattgaaaatttaccaccagtggatattttaataattccgggtgggctaggtgctagaaaatatgaaataaaaaatgaaatagtaataaaatggattcgccaacaaatgaaagaagtaaagctgatgacttcagtttgtacaggagcgctattactggcgaaagcaggtttactggaaggtttaaaagcaacaacacattgggctagtattgaaaagtttaaaaatgagtttcaaaatgttgaagttatagaaaatgtaaagtttgtagatgaaggacatattataacatctgccggaatttcagctggaattaatatggcatttcatattgtgaaaaacttgttaggtgtgcatgttgcggaggacacagcgaagcgaatggagtatgatattagtttgccaaattaaaaagcccggattgggctttttatattgaatgaatatagttaagctcttcatcactcaaaatagggcgaacagatgcatttgcattttcttgtgcttgtgttcctgtttttgcaccaggaattacaacacttactgccggatgagagagtacatagcgaagtgcaagttgccctaggatctgatttttatttgagagcagccgaagtttctctacggtttgtaagtcttcttgaaaccaaatttcatttggccaatctttgcgtaaatctccatctggaaaaattgttttatttgtgaattttccagttaaaatgcccatttttaatggaccacgaataacagctcctagatttttctcttgtaagaatggtaatatatctttttctggttttcgatttaatatattgtaatcaagttgtacgatatcaatttcgttgttgttattgaaatgatgaatgtattgtaaatcatgagtcgaaacaccgactgctcttactttgccatcacgttttaatatgtcaaatgcacgtagaaatgcttctgtttctctacgattatgccaccaaatatgacaaaaataaagatcaatataatctgtttgaagacgttgtaaacttgtttcgaatacggcgatgattttttcgggagtatcatatacaggaactccattagggtcgtagtgatgtccgattaaaccacctttcgttgataggataatatcattacgatgtcctttaatcgcggtagctaccaacttttcactatgtcctaaaccatacacatccgcagtatcaataaaattcacaccacactcaattgctttttttatagcggttatagattgtttatcgttaacaggtccccattcatcaccaccgattgcccatgcgccaaaacctatttcagaaacagttattccagttttacctaatgtgcggtaatgcatattccccctccttgtaagcatgttataacatggatatgtggggaaggaattttgtgtgtgaaaaaactcttctacaatagtagaaaaagaattacagaaactactattttatagcagcatgtataaaaaaaatcggtgtaaatatggaaatgtcgtcgaatgctatctttaattggttaatttatgggatatttttgtgaaggagtttattttataagaatagaatttagtttagtaagaaaacgtgccgatggtagtgaaaaatatgggttagggggatttgaatgaggaaactcgagcgagtaaatgttcctaatataccagagcaattatcacaacctagtgacaagcgtaggataaataaaaagaagttaaggcgacttattttaatggtcctttttattgcggcaactactctatatgttcaatatattttaacgaaacaacaagaagtaattgataaaaagaaagatacgattacggatcaaaagaagcaattagtatctttaaagaaagataaagattctttaaagactaacatagaaaatttaacagacgatgaggaagaaattttgaagttagcgagaaaagagtatcaattttctaagtcaaatgaaactatatttgtgatgccaaagtaataaaaacagttagccattgaactgcacccccaattgttagacaccgtctaacaattgggggtgcagttttttatgtatgaatgtcatggtacaaggaacaatcacatattgtagaaatgaagagtttaagctattttcataaatatggaatatgcactaaaataaatgttgttaaaattctgtcaattatattataatacaaggtaagcggatacattttttaatcaacgttgagttcctcgctcatacgactattaagaaacccgttatcctcgtataagaaaggaagatagctgtgtacgcctcaaatacaatttatatcgtaggggatgcgaaagcacctcaaaataatcccattactgaaaagtttaaaagctatttcgtagcatttatacttgttaaggatacaggggaaattgtagatgcagactgctcagcgacaattgcattaacatctcaatttgttaaatatttatttctacataaaaatataaatgacccggcgttagtaatggaagtaaagaaccgatatttcggttcttctcaaaaagcgttacttgtagcgctaaaagatgcacagaaaaaatataatcagattgctgctttgtctactcaatcatagacaaaatccagccgtaagaatcattcttatggctggatttttttatttcacattatcgtcctacatcaaaagtgaacgaaaacaaagtagagagatagaagagtaaatgcccaataggtttacctaataatccgtgggtataaatctccggtggattaaaatttcacttcattggagaatgaaaggatgaacaaaatgaaaattacagatgtaaaagtaaatcgtagacgtgtaaaactgcatacaccgtttaaaaccgcgcttcgtactgtaacagaaattgaaagtatagatgtttatattcatacagacgaaggagtgattggtaagggggctgcagccgcaacgccagttattacgggggatttcaccagcggaatggaagaagcgattttaggaccgatgcgttcatgtttaattggtcaaaatatcattcagtttcagcagttactacagggcattcaaatgagttgtattggaaattcaagtgccaaagcagcggtagatatcgctttatatgatgtatattgcgaatatcaaaatgtgccgttatatgcattgttaggcgggaagaaagaaattcataccgatattacagtgagtgtggatgagcctgtattaatggcaaaagaagcgaagaaacatatagaaaaaggatttcaaacattaaagattaaagtgggtaaagaggcgcatttagatttggaacgtattgaggcaattcgaaatgtggtaccaagaaatacgatattacgtttagatgcgaatcaaggttggagtccaaaagaagcggtctctattattcaagagatggaaaatcgtaatttaaatatagaatttattgaacaaccagtacacgcgaaagattgggatgggttaaagtatgtcaaagatcgtgtgcaaacgccaattatggccgatgaaagtatattttcagcaagtgacgcattaaagctcgttcaaggaagatatgcagacttcattaatattaaattaatgaaatgtggtggtatacgtgaagcatggcgtattgcagatatcgcagaaacagctggtgtgaagtgtatggtgggcagcatgatggaatcttcactttccgttagtgctgttgcgcatttagcggcagcgcatcctaatattcattattttgatcttgatgcaccgctttggttaatggaagagccagaaggaatgacttattctggatcaaaggtaaaccttcaatcgacagtgaatagtaagtcttaggagaagagactagtaaactatcttttaagggggataaatatgaaaaaagtaggaactgcatttttaacaactttatttatattttcatcgtttacatcggcaaatgctgaagaaaagaaggataataaagcatttatagatgtatctgctgcaacgttatggacagtacctgattcattaaggccaatcgatacaccgagtacaacaaatccagtggatctatggaaatggacgaaatcaatgacacttgacgagaaactatggttaacaaatgcaaataaattagaaacacaagcgttactcggtcaagaagtaactgttattgataagaaaggcgaatgggtgaaggtattagtgcatggacagccaacaccccgaaatgaagaaggttatccgggctggatgcctgaaaaacaattaacatataatcaagaatttgcagataaaacaaatgaaccttttgtcttaataaccaaaccaacagcgattttatatataaacccttctgaaaaacataaatcacttgaagtcagttataatacaagactgccgctattaagtgaagacacaatttcataccgtgtattgttgccaaatgggcaaaaagcatggatacgtaaaaatgatggaacagtttaccaatctcaaactgatattccaactccggcggccgatgatttaattaacacagggaaaatgtttttaggattaccgtatatatgggctggtacaagtggttttggatttgattgctctggcttcacgcatacgatctataaatcgcacggcattacaattccccgagattctggaccgcaatcaagagcaggagttgcagttgataaagaaaatctacaaaaaggagatttaattttctttgcacatgatcaagggaaaggtagtgtccatcacgtcgcaatgtatattggtgatggcaatatgattcactcaccaagagctgaaagatcggtagagattataccgctaaatacaccaggatatatagaagaatacgctggtgctcgtcgttacttaccttaaaaatagagggggtttttaaatgaaaaaagttgttcgttactcattagttagtactctattagtttcttcatttttagttggctgcgcaaaagaaaaaactgcaacaaagcccaaagatgagaagaaagtattacagttactagaaacgggtgaaattccgtcgttaaattcagggaaagtaacagatgcagtctcgtttaacgttttgaataacgtaatggaaggactatttcgtctatcgaaaaatgatgaagtaattgaagccggcgcacaaaaatatgaagtgagtaaagatggaaagacatatacattccaattgcatgatgcgaaatggtctaacggagatccagtaaccgcccatgattacgtatacgcttggaagcaattgattaatccagatacagcttctcaatatgcatacattgcgtacgatgtaaaaaatgctgagaagataaataaaaaacaactaggtctagatgaattaggagtaaaagcgaaggatgataaaacattcgtcgtagagctagaacatcctgtaccgtattttacgaaattattaattttaccatccttctatccaattaacgaaaaatatgcgaaagagcaaggtgataaatatggattagaagcaaataaagcggtatataatggaccgtttacattatcagagtggaagcatgaagctagctttacaatgaagaaaaacgataagtattgggataaaaaagaagtgaagttagatgaagtaaactatcaaattgtaaaagaaatttcaactgcggtaaatttatatgaaacagataaagttgatagagctgttatttctacagaattcgtagataaatataaaaataataaagagctaaaacaatatacagatccagttatgtacttcttccgatttaatgaaaatgtaccgattcttaaaaataaaaatgcacgtcttgcgctaagtacagtttttgataagaagggactcgcagattcatttttaaatgatggatcggttgcagcgaactattacgtaccaaaaggatttttaaagggcccagataagaaagattttagaagtacgtctggtgagtttaataagacaaatgtaaaacaggcgaaggaatattgggagaaagcaaaacaagagacaggtacaaatgaagtgactttagaattattaaattatgacttagaaaactttaaaaaagttggagagtacattaaagagcagcttgagaaaaacttaccaggattaaaagtgaatgtgaaattacagccgcatacgcaaaaattagcacttgagaagaagaaagaatatgaaatgtcgttatcacgctggttaccagattatccagatccaatgacttacttagaagtattcctttctggaagcagtgttaataatacagaatatgcaaatccagaatatgatgcattaattaagaagattaaaacagaattaggtaatgatgaaaaggctcgctggaaagcaatgcaagatgctgaaaaaatgctacttgatgatgcagtaattgcaccggtattccagcgtggattatcttacttacaaaaaccatatgtgaaagatttatatgtacatcaatttggtccagctacaagtttaaaatgggcagatttacaaaaataaaagaatggggaaacagacttcacgtatgtgatagtctgttttttcttatttaaagttagaaaaatagttcatggtataatttattagtctgtaaacagtatttgaagggaaaatgatgtctatgtttgaagaagagaaagtaatttatacaaaaagattatttatgaggaaaccaattgtagaagatattgatcagttttataacatattaaaaaaagatactgttggcaaatggctggctaaatcaagaggaatgtcgaaggaagaaacaaatgattatattgggcaacttatcttacattgggaacagtatgacttcggggtatggttgttatttaatagtgaaacaggaaagcttttaggacattgtggtttaagaaaggtagatgaaacaggtgaaatagaaattatgtatcttcttgacccagaacattggaggaatgggtatgcattagaagcagcagaggcttccattaaatatgcaatagagactttgaatgtaacaagaataattgctagagttaaagtagcaaatgagagctcgaaaaaacttttacgaaagctcgggtttatatatactcatgaagttgatcatagcgggcgcttattatcatattttgaactccatacatcatccaaagaattctagacatttcatatattttttcattgttaaaaaataaaattattactaaaattccagtgtgaaatttatgtagaatcttgtataattaacatgtttctatggaaacattttcttgcgctatttatatagggcttaatagaacaaggaaggaaatacatacatgtatataatagataaatagaatggaacatgtatagagacaaaggagagaaaagatgacgtgtcaaaaacaagggttacaatttaataacgatagaaagagggacagaagatgaaaatgaagcatgcttttggtcctataattttagcgtgtgtgctttttttcattatcattctaatcccatcgaaaagtttagtatcgcttattagtgataagaaggtagaagatgcggcaacttctttacaaaaagagaaattacaaagtgttttcttacagcaaaaaatgttagagaattcacagtatttaccgatgtacggttcatcagaatttttacgaatggatgcatatcatccgtctaattatttcaaagtaaatccagctggttttacaccgtttttaattggaactggtggtacacaaagtttagctcatattttaaatatgacatctactatggatgaattagaaggtaaaaaagtagtgtttgttctttcaccacaatggtttacaaagactggtgtatcacaaggggatttcactaataatttctccaaacaacaagcatatcattttatttttaatgatgagataaatccaggaatgaagaagcaaatcgcgaaacggctattagattataaagttgttcaagaagatgatatattaaaaaattcattagaaggtattgtatataatgatacgaaacataacataaaagcaggtttagttaaaccacttgcttatatgcatcgaaatattttagatcatagagatttatttaactctttatttaaaatcgaaccgatgaaagagaaaacaaatatcggacttcgttcaatttcttgggaagacgcacgtaaacacgcagaacaagaagggaaagcagagtctactacaaatacattcggaattgaaaatccgtattatcataaaaataatctgaagaaaaaactaaaaggtttaaaaaactttagagcaaatgaaacatatgatgaatcaccagaatacgatgatttacaaattattttagatttatttaaagagaaaaatgtcaaaccactctttatttctgtacctgtaaatgggccttggtatgattatactggcttcccgaaagaacgccgtgaagtgtattataaaaaagttcgagagcaggttgagaaagcaggatatccagtagttgatttctctggtcatgaatatgataagtatttcttaaaagatacgattcatttaggctggaaaggttggatttattttgatgaagcagtgcaaaaatttaattctgagaaataaagtatagaaatcggaatggctatgagccgttccgatttttttagtatagaggattttggtgaggacaatttgggaatgcatgtatatcttgaatctgtctataatcataatgtttcattgcgaactgggcttgataaggtattcatacacatataattgatcatcatgcgctgaacataatacaccagaagttccttgcccgttcatgaaagaaatgccgataggacgtccgattaagtattgtattttttgctgccaatgcataggggaatcactcctttttgagataatatacgaaagaaatgattgaatggttgcttatccatataaatgtagatggaaaggtgttatataattcctgaagattaatataaataaaaaaccgctataattctgaatttatagcggcttttttatattcttaagcaagatttttacgcttttttgtccatttttttataacgaagtataaaagtataagtacgacgccaccaattgcgaatgatttcacatacggaccagcaatatcgttaatattttcccaattttcacctagtttttcacctaaataaatgaaaataatagaccaagggataatcgcaagtgctgttagtgtagtgaaacgtagtaaaggcatttttgtaataccagcaggaattgaaatcgcatgacgcactactggaatgaagcgtgctgtaaaaatgacaccagttccgtaacgattaaaccaatcttctgcagcgtctatttgctttttatgtatgaaaatatattttccataacgttctaatatagggcgtccaccatatcgtccaagccaataaataaagatttgggcaataacaccgccaattgtaccgaatacaactgcgcctataaatgagatacttccattgaatactaagtatcctgcataagcaaggacaatttcacttgggataatctcaatcataagtccaagcataatgccccaataacctaatccttcaaaaaacgttaatactgaatgaataaaactacttaacattgttgcaccttctagtttatgaatttttgattataagaaccttttatttaatcgcataaaaggttcaccatatgtagattataccttatttgcataggggattgctatttcaattcttttatgtctctcataagtattatagtaaagtatataagccacgttttcatgaagggttaatgaaaagattattaaaaatttctcataaaaaatagaagcatttctgctcctattttttaaggcttgacatctaagttctgtaaaaataaagttgctgttacgtaacgctttgctaacatttgtacataagcggtatgtacagaaagggtcgcaataataatagcgttacgaattgcttcgcgttgttcgttattaatttgatcgaacttacttgcgattttatcagctttttcttttacgatgttttcaattgtatgaacggtatctgttgcatttaattgtaagcaattcccttgattgagttcttcaaatagagaagagtatgctacatataaatgaacaggattgattaaatcatcacttcgatcagctgggtcatttacaataaggcgtaatagcttacgaatggattcaaaatcaagtgctgtttttaaatcttcgacaataaatagtaaggctgcttgttcaattgaatatttttttcctttttgaggagagccaatcatttcttttatatctcgtttcacccagttttgcatagcagttacagagaaacttgtgttttcaatctgattgccaagcgcaactatttcatttaaagaaaaaccgacatcagtatcgtcaattttaatcagcttttcaaaaataggtgaaagtgcggtagtaataaaagctgtaacgctttgtccgctttcaatatcttttttatgtgactttgcccaagcttcttgtaaaataccgagaggctttttcgtattccatcctcttagtgatagaagaagggtagccatttcgtttcgtgtgagatgaaatgtttccatcttttcacctccaaaataataaaaagttcttatgaacttataatatgttttgtttcatttaaagtcaattctgttttgcttaatttttcctttgtgaccaaactgttgaaagtaaataatacttgcatatttcgacaaaagttcatataataagttcataagaacttttaaaatgttcttaaaaacaaatctatcattctgaatttactagaaagatagatttcacatatatctatataaaaggagaatggatataatatgttgaaaaaacttgtagcagtaatgacagcattcatggttatctttggggctagcagctttatgttcgtagatcatgcagcagcgaaaagttacaaatctggtaaaaaatcatttacaccaagttcaggtcaaaagtcaaaagttgatttaaacaaaaaagactcaaatgtaaattctcaaaaaacgactccagattcaaaaacgaaagcaacaaacacggcaccaaaaagtaataaaggaagctttatgaaaggtttattactaggtggtcttggtggtttactaatgggtagcttatttgcaaatatgggagctcttggttctgtattagcatttatggtaaatatgttagtaatggctggtatcgtaatgttagcagttcgtgcatttaaatacttcaaagaccaacgtaagaagaaggcagatgaagtagcatggaaacaataaaaatttctgaacaagagcttataaatgcgctttgtatatatatcgctgaaaaaagacaagtgggtccagaagaagtattagttgaactcatgtatgatgacgactacggtttctctgcggaagtagaggtaaatggtcgccagcaaattttaattcaagcaaacttaatcgaagctttacgcttattgcttgacagagaatataatgtcaatccattcgcagcgagattacaacttgaattagatgatgaagaaggcatttacgcattagcgaaatttaataactcagatgagtagagaagagagctgttgagaataatctcagcagctctttttagtatgtgcatatgtagatgagtaatcacgccaaatttcattcatctttcgtctaccgatatctaccatcggattaaactgaattgcagatttctgacgaacaaagtgaacgttttgaatggcgtgagataattgttggtcgactatatcacgttttttgcttgcatatttagcaatagatagacctgcaactgttccttgcgccatcgcaatttttccgctttcaatgcctgtaatattgccagctacaaataaaccaggaagaggagtttccattgtttcggaatggagaggaacgtgtccacctaattctgaaatgtaatggaagggacaaccagctacagctgcaagttcggcaagtgggtataatcccccggcaatacaaacaaaatctgcttcatatattttctctgatccattaataacatttcctttagagtcaatattagcaacacgtacaccttcaacttgatctgttccgataatttcaagagctgctttccgaaggtgaagtggcgttccgtttattttcattccgctgtttggatagaatgttaatccagcttttcgaacccaatcatatttcataaagtggctacctattcgcaaaatagcagaaggagcgagatgtgctgcatttaaaagagagtttaaaacttcttcaggttcaccagctttttgacttaactcgcttttctcagggagtacaatatgatccactgtaattcccgctaattgcaattcacttaaaatggcgaaagacaaaatgttagcaccaataataattcctttttttccaacttgcacgcgatgaacatttgtcataacttgagctgctccaattgacatcactcctggaagtgtccagccaggaaggggaatagaatattccgcagctccagtagcaagtagtacgaaaggcgcttctaacgtaccgatattagtatgtacaaaccaattgttttcatctctatctaaattatagaccgaaacaccgcacctgatatgtactgaaagtgattctgcttcttcatgaagtcgcttcgattcttttattccgttccaccattctccagtaggctcttgatgcaactgtcctaacaatctcccgcccggcttcataaattcatcaataacgagcacttttagtccgaaacgagcacaagaaatagaagcagataatcccgctggccctgcaccaataataattacatcactcatcgttttttcaccatctctctcacgatattcggatgctgtttcccgctttcaacaaccatgttttcttctacaacagttaagcatgcgcgtacatttgtttgattatttactgtcatgcggcattcggaacagtgtccgatattacaataaatacctcgcggtgttccgctatcttcatgaactcttactgtcctaattccatttgctaacagggcagcagctatcgtttcatgttcatatgctccgtattgatgaccgttaaattgaaaggtaatacgctcactactttgtaaagtacctaaaatagggtgatgtgtaattctactcatttactttcacctaccgatccaaaagtaactgcacgtattggtggttgatattttaacggtagttcattaagagttacgtcaggattcgcattttcaatcattcgatctatcattattctgcatgtgcgaccaccgcaaaatcccatgccagcacgtgttcttagttttaattctcttgccgagcagttatattcagcaattgtcgattgaagttgcccatatgtaacctcttcacaacgacaaacgattaagttgtttttatttgtcatgtgtattcctcctctagttcggttttcacaaattatatatgcaaaaatcatgccaatatagaggagggagagagggctacctgtaaacgcctgatcggtgcatactgattctttattgaagtccaagtttctttaaacggttatataaagtagcccttgttacaccaagttgttttgcgcattctaatttattcccatttaaaattcgtaaagccctttcaataacttttttctcatgctcatccatctcttcttgtaaagaaaggattgtattattgttgctgagtaatagggaatgggctgtatggttgtctaaagtttcagtcgtatgaaatggtaaatattcttgttttataattccgtctgttgcgaataccacaagccgttcaacaacgtttcgaagttcgcgaatattacctggccaattgtaatgaagcagttcatgcataatgcttgaaggtaagtcacgaattggtctgttatagttgattgaaaaatcgtttaagaaagaataggttaattcaataatatcctcgcgtctttcgcgcagcggtggaatctgcaagctaactacatttaagcggtaatataaatcttctcggaaagttccttttctcatttcttcttgtaaatcacgatttgtagcagcgataatacggaaatcaatattaatttctttttcaccaccaactcggtaatactttcgctcttgcagtacacgtaacagttttacttgcatatcaagtggcatttcacctatttcatcaagaaataaagtaccgccttgcgcgagttcaattttacctttttttcctttactatttgctccagaaaacgccccacgctcgtaaccgaataattcactttcaaataatgcttctggaattgccccgcagttaatcgaaatgaaaggcgccttcgctgcttcacttgcttcatgaattgctttcgcaaatacttcttttccaactccgctttccccaagtattaaaacagttgatttcaccgaacaaacttttctagctaattgtatcgttctttgtataacaggactttttccattcatcgcaaggaatggatcggattcatctttatactttgccacttcttgttctaaacggtgcatttcatgtgacatattaaatagtttttcatttaaagcgacttgatttgtaacatctgtttctgaaacgactgctcctataatttcatcattacaataaactggatttgaattaattaatacgaataaatcggggcgaggctgatggaactgagcgactatgctttttccatcatgtaaagattgtaaaatttccaagtctttataatcaaaaaaacgagtaatcggttgcccaataatctcattatggttgactgaaaatattttttcagcaccatctgtccaagttcgaacgcattctttactatcaattactgtaacagaagagtcagttgtttgtattacagtgtcataaaatgactgtagttcattgtaggacttataaagaaatggaatcatttgctgagaagttatacagcatatcggctcatcgttttcgttaaggatgataacagctaattcataagaaaaagcgtcaattaatgcagtgaatgagtcatctacataaataattgcgcaattatattcttctgtagtagaagggaggtaataaaacctttcgtttattttcttaatgcgatcaaggctacatgtatgattgattaaaacgctttccaaaaattcttgtatagtcggaaatgagaattccataatgtcctcctgttatgtataaaaattttgacagtgataaaaaaataatacacctatttactatgaatttaaaatatttttacaaataaaaatattttttataaaaattgtatatgtacagaattggcacgtcaattgcataaaaagaaagtgagagggctaggaaaggaggagtatattgtgaggcactgcgacgttttaattataggtggtggaataatagggtgttctatcgcttattacacttcaaaatacggaagagacgtaacaatcattgaaaaaggggaatttgtcagcgggacgtcttcacggtgtgatgggaatattttggccattgataaagacccgggatttgatagtcaaatgtctttagtaagtcaaaaattagtaactgatttaagtgaagaattagagcattcatttgaatatagggcaccaggaagtattctcgtatgtgagtcagacgaagagatggaagctgcgcagcaatgggtaaatcggcaacaagaagctggattaccgtttcgaatgcttgataggcaagatataagggaagagtcgcctttttttgctgatgatttattaggcggtttagaatgtgcgacggattcaactgtgaatccatatctccttgctttctcgcttctgtcagaggcacaaaagtttggcgcaaaagcttttaagcagacggaagtaaagagtatggaaatagagacggatggttcatttgttgtagaaactacgaatggaacttttacagcaaaacaagttgtaaatgcagccggtgtgtgggctcctaagattggtcagatgttaaatataaatataccaattgaaccgagaaaagggcatattattgtagcttcaaggcaacaacacgtaggatgccgtaaagtaatggaattcggttatttaatttctaaatttggcggaaaacgaaaagtggatgctttaactgaaaaatacggggttgcgctcgtatttgagcctactgaaagtcaaaatttcttaattggtagtagtcgtgaatttgtaggatttcatacgaggataaataatgaagtcattaaatgtatcgcaaatagagcaattcgcttttatccgaaaatggcagatatgatggtaattcgttcttacgctggtttacgtccgtggacagaagatcatttaccgattatttcacgagtggaacatattccgaattatttcattgccgctggacatgaaggtgatgggattagtcttgcagcagttactggaaaagtaattgaagagttattaaatgaaaaagagacaattattcctattgaaccacttcgtttgagtcgttttacagaaagggtgttaaacggatgaggtcacaaagagtctttacgacgattgatacacacacaggtgggaatccaacgaggacattaattagtggacttccaaagttgattggagagacgatggcagagaagatgttacatatgaaaaaggagtatgattggattcgaaaattgttaatgaatgaaccgcgtggtcatgatgtaatgtcaggagcattattaacagacccatgtcatcctgaggctgatataggtgttatatacatagagacaggtggatatttaccgatgtgtggtcacgatacaatcggtgtatgtacagcgttagttgaatcaggtttaattccggtagttgaaccgattacttctttaaaactagatacaccggctggcttagttgaagtagatattgctgttcaagatggaaaagcaaaagaagtatctttctgtaacataccagcttttttattgaaaaatattactgtacaagtgaaagacattgggactatagaggctgatattgcgtatggagggaatttttatgccattattgatgcgaaatcagtagatctagaattagtaccagaaaatgcatctacaatcatcgataaggcgattcatataagaaacacaattaatgagaagtttgaaatcactcatccagagtattcgtttataagaggattaacacatgttgaattttatacagatcctactcatgaatgtgcgcatgtgaaaaatacagttgttgtaccaccaggcggaatagatcgatctccatgcggtacaggaacatctgcgaagctagctgtattatacgctcagaaagaaatcgaaattggtgaagagttcattcatgagagtatcgttggttctttatttaaaggatatgtcatgaatacgacacatgttgaaaatattgaagctgtcataacgaaaattacgggatcagcttggcttatgggtatgcatagatttttttacaatgaaatggatccacttaaagaaggatttttgctaattccgccgatggaacatgaaacggaggatataaaatgaacattcaaaaaatgtatacagcagtagacgtacatgtaaatggcgaggcatttcgtgtaatgaaagacgtaccatgcaaatactactacagtttggagcaattaaatgaacaattttcaggtgaattagcagaagagatgaagcttttattaaatgaaccacgtggttttatcggtttgaatgggtgtattgtcgttccatctatctataacgaagtggatgcagctgtattattttttaatcatgaaggttcggttccgcttcattatggaggcattgttgcagtaataacgatgttactcgaaagtgggtatttaaaaaagagagagtccaatcaatacaaaattgaaacgttatctggaatatttttagttcatgcgtatgtagagaatgatgaagttatatcggtttcgtttgaaagcaaactatgctatatgattgagggaaatttacaggttggtaatgtaagttattctctcatacaagcagataaagtatatgcagttgtagagaaaggtgcgtattcgccagaaattcgcatggaaaacatttctgaattgaaaagatggggagaagctacactacagactatacaaaaacagtcgctaataaaaaggcttattttagtagatccttcgcaaaaagaaaagaaccatataaaatcgattacatttcatgaagataactttatcgtacattcgccaggttttgtttctactattgtttcctatgttcatgcgttatttaaaaatgattatatggcggataaaccttttaaaaatgaaagtatatttaatagttttataactgtggagaaagtgaagaaggaggaactaggatacattttccgttttgaaagtagagggtttattacagggatgcagacgtttctattagaccctacggatccgtttccggcaggtttcttattaaaataaaatgtgataaggagagataaatatgcaaaaaattaaaggggcatttccagtattaataacaccgatggatgaatttcaggaaattaattgggatggggtaaagcaaaatgtaaattactttatcgaacaaaacgttgcaggtatcatcattaatggaagtacaggagaatttgtaagtttatcaaaagaagaacgatttaaaatggtagcaaccgtgttgaaagaaattgatggccgtattccagttattgttggaactgcagcagagacgacgaaagaaacaattgaatatacgaaacatgcagaagcgcacggagcggattgtgcattaattataaactcttactattgtaaaccgaaggaagaggagatttattttcattttaaagaaatctcaaactctgtaaatataccaattatgttatacaataatccatttacttctggtgttgatatgagtacagagctaatgctccgtattggaaaagagtgtgaaaatgttacacatattaaagaatctagcggagatattcgaaaagcgagagatttagtaagacaaagtgaaggggctttccaagtcttctgtggttctgaagatttagttatggaatcatatttagttggtgcctcgggatgggtttcagtagcaggaaatatcgttcccggtctcgttacaaaaatgtatgagcattttcaaaatggtgaattagaaaaggcgtgggaaataaacgatgctattttaccactttgtgagtttcttgaaggatcagggaaatatgttcaaatcgttaaacgttctatggaattacatgggcaagcgggaggaccttctcgctatccaagactagggttaactgtagaagaagatcaaaagcttcaaacgattttatcaaatattgcagctcatgcagctgtttaaataaggaggagaacataatgttaaagacaaatattgagctgaaaccaaaagtggaagcgtttttaaatgaagaaattaaaatgtttattaatggcgaatttgtttctgctattggcggaaagacgtttgaaacgtacaatccagcaacagaagaggttctagcagtcgtatgtgaagcgcaagaagaggatattgatgctgcagtaaaagcggcaagatctgcatttgaatctggcccgtgggcagaaatggctactgctgaaagagcgcatcttatttataaattagcagatttaattgaagaacatagagaagaattagcgcaactagaagctttagataatggaaagccatatcaagtagcacttgatgatgatatttcagcgactgtagaaaattatcgttattacgcaggatgggctacaaaaattattgggcaaacaatcccgatttcaaaagattacttgaattatacgagacatgaacctgttggtgttgtaggacaaattattccgtggaattttccgcttgttatgtcttcttggaaaatgggagctgcactggcgacaggttgtacgattgtattaaagccagcagagcaaacgcctttatctttactatatacagcgaaactctttaaagaggctggatttccaaacggcgttgtaaactttgtatcaggctttggtcctgaagcaggggctgcaattgtaaatcatcatgacattgataaagttgcttttacaggatctactgttacaggaaagtatattatgcgtcaatctgcagaaatgattaagcatgtaacgttagagcttggcggaaaatcaccaaatatcattttagaagatgcggacttggaagaagcgataaatggtgcattccaaggtattatgtataatcacggtcaaaattgtagcgcaggatcacgtgtatttgttcatcgtaaacattatgaaactgtagtagatgcacttgtgaaaatggcgaacaacgtaaaacttggagcaggtatggagaaaggaacggaaatgggtccactcgtatctaagaaacaacaagagcgtgtgttaaattacattgagcaagggaagaaagaaggtgctacagttgcggctggtggcgaacgtgcgcttgaaaaaggttatttcgttaagccaactatattcacagatgttacagacgatatgacaatcgttaaggaagaaatatttggaccagttgttgtcgtacttccatttgattcgacagaagaagtaattgaacgagcgaacaactcatcctatggccttgctgcgggtgtatggacgcaaaatatcaaaacgggtcatcaagtagcaaataaattaaaagcaggaacagtgtggattaatgattataacttagaaaatgcagctacaccatttggtggatataaacaatctggtattggccgcgaattaggttcatatgcgcttgataattatacagaagtgaaaagtgtttgggtaaatataaagtaatagggcgttttactgataaaaattgagggatgaaataatgaaagatgcggacaactagaaagtttgataatagttgtccgttttttttatatacaaaattgcttttccaaagaatgataagggggatttggatggagaatttagtagaatggttagtagggcaagtgtggagtatcggtttagttgtttttgcattaggggcaggcgtatatttcacgattgcaacacgctttttgcaaatccgttattttaaagagatgattaaactattatttgaaggaaagagttcagagacgggaatatcatcttttcaggcattttgtttagccttatcaggaagagttggaattggtaatattgcaggggtagcgacagcaattgctttcggcggtcctggagctgtattttggatgtgggtaatggctttgttaggggcagcgagcgcgtttgtagaatcaacattatctcaagtatacaaaagtaaagtagggaatgaatatcgcggcggtactccatatttcattgagaaaggtttgaaaatgaaatggtttgcagtcattgtagcagtagttgtaacactttcatatggcgtgttattaccaggtattcaatctagtagtatcgcagttggatttgaaaactctaatggtattagcaaatatataactggtatatttttagtcgtgttactagcagcaattatttttggtggtgtaaagagaattgctggcgtttctcaaatgcttgttccatttatggcaattggttatgtaattgttacatgtatcatattaattgcgaatgtaacggagattccaagtatgtttgctttaattttctctagcgcatttggtgtaaatgaaatgtttggtggaattgttggtgcagctattgcatggggcgtaaaacgcgctgtattttcaaacgttgctggtgtcggagaagcgacgtatagttcggcagctgctgaagtatcgcatcccgcaaaacaaggattagttcaagcgttttccatatatatcgatacaattgtcgtatgtacagcgacagctcttatgattttaataacaggtatgtataatgttatacctgaagggaaaaccgccattgtacaaaacataggaaatgtggaagctggtccaatttatacacaacaagcagttgaaactgtgataacagggtttggtccaatatttatttcaattgcgattttcttttttgcatttacaacgttactcgcttattactatatcgctgaaacgacacttacttatttagatcgtcaactgaagtatggctggttaaaaccagttttgaaatttggatttttaattatggtttacatcggtagcgttgaatcagcgtcgcttttatggaatcttggagatttaggaatcggtagtatggcatggttaaacttaatcgcaatcttacttttaagtaaaaccgcattaaaagtgttaaaagattatgaaacgcagaaaaaagaagggaaagatccagtatttaatcctaaaaatgtggggattgaaggattaacattttgggaagaaagaagtaaagaggttgaaagaaaaagttctagagaaaaagttattgtcgatgataatttaaaattataactcaaattaattgaaaattcttaatttaaaagaaggtatattgcctccatttcatcacatactacaataagtatggataatatgactggagggaataagatggaacatgagcaacatagttcgataaatgatattctacatcattataaagaaggtataggtagttttacaaatcaaattcctgaaatcgctgagacatataatgcgttcacgcaagcttgttttcaagagggttctttaacaaaaagagaaaaacaacttattgcattaggaattagtttagcaacgcaagatgagtattgtacaatttatcatacaaaaggttgtcttgatcaaggatgttcggataaagagattctggaagcatgtggtgtttcagcagcatttgctggcggagctgcgatgagtcaagcggtaactttagtgcaagagtgtttaacagaattgaaaaatcaaaagcattgaataaaaaaacgttttaaactttatgtttaaaacgttttttatgtgaaattaaatttaagtataaaaattatctaggatgggttcaatttatggttatacaataatggagaattttaaatttagtaggaatgagaaataaaaactatttatttagttttaaggttttgtaaaaagcttcaattgtttcatataatcaatagcttttgttttgtttttctgtttagaaacataatgtgcctcattaaaatctctatagtaactgttaactacttcttcagaaagagcaccgtcagatatagctcttttaaccgcgcagtttggttcatttgtatgtgaacagttagaaaatttacatctcatagaaatctcttttatatcttcatagccaaaatcaaaattcctctcaaggtttatcaagtcaaatcctattttactaataagaaatccctccacttttgaaagagtcttttagaaacatacatacaaattttatcgttttcaatttgtattcactttaatattctatatcttcataaatagatttttctacatcaggaagaactgtgtatatactcttaccgattaaagcttctaattctttcttaatcgcataaaaccctttccaatgtaaagatgtatgagatgttgtaccatgacgcaaaccaacagaaattaatcttctttccagcgtagtaaagccatccgcatcagcaagagcgtcacaaagagtaattactttattgtataagtcgtagttacaatgttcatttaatatttcaactaatcggcttctcatatggtcaggaacgagactccattctgctgcgatatctatatgttcatttttgcatgggaatgagtgtgtcacacaaataacagcgtttcctgtataccctaaatcattcatatacatataaccatcataggaatgaatgaccgatttggtaaaacctttgtatcttccgatatcatgcaaaagggcagcgttatatgctatgtcagcatctagcttgtaccctttttttataagttctataattatgttttcagttgcatgagcaacatgtagtgaatgttcaaaccaagggcccgggttttgttcatatgcccattcgagtaattcttttgcgtacattctatctaatatatatttcatatcgttatcctttcacaaaaaatcatatcttaactataaattcctcttattatttcattattccttctttaaaaattgttacaatgaaacaaaagggggaaaagtaatgcgaaatttagtaattgaagaaattaagaaactagaaaatgatatagaagaactttcgaaacttttgaaaatggttgtaaatgatggggcatcaattggttttttgcctccactggaacaaaaagatgcaacaaagtattggcaaacagtattagcgccagaagtgatattgtatgtggctaaaataaacaacgaagtagcagggagtattcaattacaattagttactaagcctaacggaattcatagagctgagatttgcaaattaatgactcatccaaactttagacgaaacggtattggacgatcgcttatgcaaaaagcagaggaacgagcaaagcaagaaaacaggtctcttttagtattagatactagagaaggagatccttccaataaattgtacaaatcactagactaccaagaagttggaacaataccagggtatgcaatttcttcgaatggaaagttagatgctacggttctttattataaaaacatttaagttataatcaaacggggagagtgcttaattattagtaagtgaataataaacgactatttttaacaccgtctatatttttctggcggtgttaaaatagttaattataatctaattaacgcactaaatgaatttgagaaagtttttagagggttcttttagtaatgattctcgtcttataataaatgtagagaagatgactagccgactatagttattttcgctttattatgggaaggggatgaaagaatgaaaaagaatagtttacaaaagatgaagaaagttattttaagtggtggcgtattacttacgggattattaacatttgggttttcagaaaaggcttcagctcatggatatgtagaatcaccagcgagccgatcttatttatgtaagcaaggtgtaaatgtaaattgtggaccaattcaatatgaaccacaaagtgtagaagggataggtggatttccacaactaggaccttctgatggacaaattgcaggggctggtcattttcccgctttagatgttcaaactgtagataggtggaagaaagttacgttaaatggcgggacgaatacattcaagtggaaactaacggctcctcatagtacgaaagagtggaaatattatattacgaaaaaaggttggaatccaaataaacctttgacgcgatcagatttagatttagtgccattctatgtaaaaaatgacgggggagctagaccagggacaacagtaacgcacgaagcaaatgtaccaactgaccgtagtggataccatcttattttagctgtttgggaaattgcagacactggaaatgcgttttatcaagttatagatgtaaaccttttgaataatggcttatcctcaaattttgcttttaacaatgtagtgcaagctcctacactattttaattgaaacatacatttcgatcatctaattcattttagatgattttttttatgaaaatgatgaaaaatatagaagaaagtgcaattatttataaaaaaatatgctttaaatattgtcatatttgcttctttaagatatccttttcatgaagaggtggaaaacatggaaaaagtactagttttcgggcataaaaacccagatacagatgcaatttgttctgcaattgcttatgcagaattgaaaaaagaattaggaatgaatgctgagcctgtacgtttaggcgaaatcagcggtgaaactcaatttgcgttagactattttaaagtagaaggaccgcgttttgttgagacagtagcaagcgaagtggacaacgttattttagttgaccataacgagcgtcaacaaagtgctaacgatatcgaatcagttcgtgtgttagaagttattgaccatcaccgtattgctaactttgaaacaagcgatcctatatactatcgttgtgagccagttggctgtacagctacaatcttaaacaaaatgtacaaagaaaatggcgtaacaattcgtaaagaagttgcaggtttaatgttatctgcaatcatttcagattctttactattcaaatctccaacttgcacagaacaagatgtagcagctgctcgtgaattagcggaaatcgctggtgtagatgcagataactacggcttagaaatgttaaaagctggtgctgacttaagcggaaaaacaatggagcaattaatctctcttgatgctaaagaattccaaatgggtaatgcgaaagttgaaatcgcacaagtaaacgctgttgatacaaacgacgttcttgtacaccaagcggaacttgaaaaagtaatttctgcagtagtagaagaaaaaggtttagacctattcttattcgttgtaactgatatcttaactaacgattctgtcggtcttgcgatcggtaaagcagcaaacgttgttgagaaagcatacaacgtatcactagaaaacaatacagctactttaaaaggtgttgtatctcgtaaaaaacaaatcgtaccagtattaacagaagcattccaagcttaatcgtattgcgtacagatgaacagtaaggacaagtagtcagattggctatttgtccttttttatttataataagcagaaatttttaacttttaaacagtcgcattgtgtatgcttaatgatatggaagtattgaaaagtaaattacaggggctttttgaaaaaatattgcatctgtttcaaaattagagagctggatttcggaggaactgcgtttaaacgctgaaatacagatgttgcgtttaactttttagaagaaaggatataaagttttgattaacgaattaaaataaggatagcgttagctatccttataatcgtttattcgtaagattttttcttgtttatataaaatgtgattatcgtagtaatgaagaaaataggtatcgcatacacttgcccaacaaataacttccagccgacataattatagccttcagatgctgggatgataacggaaataacgcaaacgataaaatagactaatagtgcaggaataatatttttcatttttatgaacctcctttattgttttattaatacatacttgcattataatttagtttcattattttgaagaaaaaatgaaaaattttttatggtattataatatttgcaatgagagtaatctatagtacgcatatggtaaaatgtgtaattttaactttcagaattattatatagtatctcgagaaaaaaatgtacaaaataacgaattttatttaccaaagtaaagggagtagaaatatatatgaaaaggctatgtataattccatgcggaaaaaagaaaatttgggataaacattcagactacggaccgatggaagcaaaagatgtatatattagtccgttcggaaaagcatgtcaggcgtacgcaactatgtttttcgaaaactgggttatattatcagcgaaacatggatttttaagaccaagtgatattgtattagaaaactatgatcttgcatttgattcaaaaagcgatgaggtaataagtatagagcaattacaaaaacagatggtagataaaagtttactacagtttgacgaaatcgtcttactagcagggaagaagcataaaaaagtagtgacaaagttatatccagaagaaatgattacatatccgctagaggggtgtaaaggaattgggtatatgttgcagaggttgaaagaagctgtgaaggaaggggaggaaatataggtgtagtttcagtgattttaaactctatttatttagggagctgaaaagtaaaatagagtttttaggcatcgccgaaagggtgatgcttttttgttcgtgtcgtcattcatgtaaaagtaatttagagaataaatcattcgatttatgaagcgatagcttttttatatcgaaaacaaattgcataacttttagaaaatataggacgtatgggcacagttaagattgtaagtgggaatagcaataagacaagttttgaataagatattaagaaaggagatgttgatgaataatggctagatatagtttgcacggaggacacaatagtattgttcaaggtgctaatttcgggaatcggaaagaacacgttctagataggcaagttaaagatgccgtggcggctaagttaagagccctaggacacacggtttatgacgatacggacgaggtaggggcaactcaatcacaaaatttaaataatatcattcggaatagcaattcccatgctgtggatttagttatttcttttcatcttaatgcaagtgatggaaatggacagggtgttgaggttttatattatgatcagaaagatttggcggctaaaatctcagctcaactagcaaaagatattggatggcgtgatcgaggtgcgaaacaacgtacagatttagcagtattaaatggaacgaaggcaccggctattcttattgaattagggtttattgataatgaatccgacatggcaaaatggaatgttgataaaatcgctaattctattgtatttgctcttacaggacaaactggaggaggtgcagcgaatttgctcaaagtaaaaactggtggtgtagcatttagtaatttacaagatttggctcaagctatggttgatgcgggtattgatggacaaattgtcgttcaaaaagatggcattggttatgctataacgaatggctatccgtccgggaatatcgataaatttacagcttggttagatgcacgtaaatggtactatgagtacgtgagataaaacgaaaattggtttgattaaaaactaaaaattgtcttatttttagttaacaagtatattaagtaactataaaaatatggacaatttatatgtaaattagtacacaaaaccacctgtcagaaaggtggttttatttatcaagctatttgcgggaagtaaaattctcacctcaaaattcggatgaagctaagaaattaggtgggaattacactgctcgtagcctcctactaattatcgtttcactttatatagtttagagttttgtaaatctttacttattaaacccgtaataatattttgttttctcaatacataagccgaattttaaattattacccaataatataatacctctcatactatttattagttgataataacaaaaaaacaagctttgaatataataatgaaaaaggagatgttaaataatgggttatattgtagatatttcgaaatggaatggcgacattaactgggatatcgcagcaccacaattagatttcgtaattgcacgtgtgcaagatggttcaaactatgtagatcctttatataaaaattatgtacaagcaatgaaagcaaggaatattccgtttggtaattatgcgttctgtcgtttcgtttcagtagaggatgcacggatagaagcaagagacttttggaaccgtggtgataaaaatgcaacagtttgggtagctgacgtagaagtaagaacaatgaacgatatgagagcgggtgcacaagcttttattgatgaattacgcagattaggagctaagaaagtcggtttatatattgctcatcatatgtatgctccatttggaatggaaaatgtcaattgtgattttgtatggattcctcgttatggtggtaacaaaccggcgtatccatgtgatatttggcaatacacagagacaggaaatgtggctggtatcggcaagtgtgatttaaataagctgattggaaataagccgttagcttggtttacaaatcaaattgttgagccgataaaaaaacaagaaggggttggaattatagtgaataaatatagcaaagtagttacttatgaatttggtgtaaatttaatttctgacatgattcaaatgatggataagcttggatatacttctaaaataatatctcgtggagataaccaagggcttgtgtatttcgaaacagattatcgtcaagggaacgaactggacaaagcaactgcttggttagatatgaaaggaattaaatatttttatacaaaagagtagtttgcaaaaataagagccgtcatgtgacggtttttatttttatttaatcttttaactctacttataatatggagaaaatagactaataaacaagcctttgtatactttcaaacatagaatatgatgaattctatcaaggaggaagcatatttatgagaaatacttgtcattgtggacattttcaagattgtaataaattttgggatgatttaatgtttgggagatgtagatgtaagcgcaatgattttcacgagtgttgttgcaaagagaaaccgaagtgtgagtgtgaaaaatgtcattgtaaaacaaaagcgaaatgccattgtaggcatgaagaggaagggtattaataataaaaaagagtacgattggtcatctccctgtcaagtagacagaaataaaaagagtattatgccacggccttttcccgatattctatcggggaaaggccaattcatggatattttgaaaatcgaaacgcctagttaatttagctaggtgtttttttatatggccataaattctttatcgaagtagcacttgtccattaagttgtttacaatcccgttgaaataagcgaatttaccctttttcatttttactccggatttaattttcataacaaattctttaatagcttttaagccaatagctaactcttgttctttagtaaatgctgtatcacctgttgtatggttaacgattttattacactgtcttacgaccttccacagttcttgaattgttttagattcactgtaaaaagagccaactaaagaaataaaacgctctggtacccaatgagcaacaaagtcagcttgttccatattctcttttggattattgctattctcattactattacgtttgtttatatcttttatattttgttttaaggaaacaggttttgttttaatggtaggacactttgtaggacgttcaccttgtgtcttgttggacacttcttccacaataggttgaataataatagcgttagaagtttgaagcatatcttttttacgtttcattgccacctgtttaatcatctctagatccacaagcttcttcattaaacgttgtacagttttatatgaaacttccattttttcagcgattctgtttttgcacaggaaactaacacctacatatttgcagctgtggcgctttaaaatttcaagtaatgtaatgagtttagattttacatctgtacgcttaatagacatacggatagtgtctctgtatgcacgtatagctctatttagttcgtccacatctttgaataatgataagttgcggaaggcttctttagttgcgataacatcaatacgtttctttttcataatgtaggcccctttgcatatacaaaagagcaacagaatgccaagtgtaagcaaactgttgctaaggagcccttacgtactgtaaaatagttcgtaagagtacagcaagtgtttgcctagatggattaggcggatggtatatagagtgttggtcgcactttatatacacgctgtgctcttttattgtagttatatagtgtttggtcaattgatgactgggccacagcttttagctcatttagcacaaattcatgtttggtttaaagaatatggggtaaatattaaggaataagggaaaagcggcttacaattatgtaagccgctttttattaaagaaattatcatataaaattcaaaatcaccttataaataatacttaattagaattattattttgacgtacttattattacttgttataattggaaacaaacgttctgaaaaagattctcatttataaaattgaggtgttatatagatgacaaagaaaagaataggtttactcgtaatggcgtatggaacaccagaatcattagacgatgtagaggcatattatacacatatccgtcacgggcgtacgccatcagaagaagcgcttgaagatttaattgggcgctataaagcgattggtggaatttcaccgcttgcaaaaattacgaaagaacaggcgcataaattaacagattcaatgaataacatatttacagagtatgaatttacttgttacttaggtttaaaacatattgcaccatttatagaagatgcggtagaagaaatgaagcgtgatgggattgagcaagcgattagtatcgtattagcgccacattactctacatttagcattaaagcgtataatgaccgtgctattcgtctttcgcaagaaattggtggtcctgttattgaaccaattgaacaatggtatgatgaaccgaaatttatttcgtattgggcagaccaaataaaagagacgtttacagaaattgataataaagagaaagcagtcgtaattttttcagcgcatagtttgccagaaaaaattattgcaacaggagacccatatgtagaacaactaaagcatacggcagatttaattgcagaagctgcaaatattcaaaactatacaacgggttggcaaagtgctgggaatactccagatccgtggattggtccagatgtgcaagatttaacgaaagatttatatgaagagcatgggtacgaatctttcgtatattgcccagttggttttgtagcggagcatttagaagttttatatgacaacgattatgaatgtaaagttgtaacggatgaattaaatgccaaatatttcagaccaaatatgccgaatgcacaatctgcatttatcgactgtttggctgaaattgtttccaaaaaagtgaaggaaatagttgacaaagatttagttttaaataataattaatttataataattttaaataaataatgattactacgaaagaaagaggaggatccccctagatgaatccaaataatcgcttaacaacaaaccaaggtgctccagttggagacaaccaaaattctcgtacagctggtcgtcgtggaccagtattattagaagactatcatttagtagaaaaacttgcgcactttgatcgtgaacgtattccggagcgtgttgtgcatgcacgtggtgcaggtgctcacggtgtattcgtaacgaaaaatagtatgaagcaatatacgaaagcagcatttttacaaaatgaaggaactgaaacgcctgtatttgttcgtttttcaacggttattcatggtcaaggttctcctgaaacagcacgtgacccacgtgggtttgctgttaaattttatacagaagaaggaaactacgatatcgtaggtaatcatttaccagttttcttcattcgtgatgcaattaaattccctgatatggtacattccttaaaaccagcacctgatacgaatattcaaacgccagatcgttattgggatttcatgacgttaagtccagaatctacacatatgatgacatgggtattttctgattacggtacaccagcaagctatcgtgaaatggagggtttcggcgtccattcatttaaatggattaatgaagaaggtaaaattgtttatattaaataccactggaaaccacagcaaggtgtacgtaacttaaatgcgaaagaagtgcaagaagtacaagggaaagacttcaatcatgcaactcgtgacttgttcgatgcaatcgaaaaaggaaattacccaaaatgggatttacacgtacaagttatgcaattagatgaaatggactctttagactttgatccactagatccaacgaaagtatggccagaagatcgcttcccattaatggaagtagggacaatgacgttaaatcgtaatccgaaaaacttctttgcagaagtagagcaagtagcgttctctccaagtgcaactgtaaatggtattgagccatcggaagataaattattacaaggtcgtttattctcttacccagatacacagcgttatcgtcttggtgcaaattacttacaaattcctgtaaactgcccatacgcagctgttcataatcaacaacgtgatggtgcgatgcaagtgaatcaaaacccatctacaatcaactacgaaccgagtcgtcatgcagagaatccagttgaagacaaagcttaccgcgattcaactatgaaagtagaaggctatgtatctcgtgaaaaaattgagaaaccaaatgacttcaaacaagcaggtgagcgttaccgttcattctctaaagaagagcaagataacttaattgcaaacttaacaaatgatctaaaagacgtaaatgaacgcacaaaattattagctgtttgtaacttcttccgtgcagatcaagaatacggtatgcgtttagcgcaggcattaaatgttgatattacgcaatatgtaggaaatgctccgaaataaataggaaaagacgaccgggtttcggtcgtcttttttgtataaagttatgtcggtattttgcatgtaaaacatgtcgcaatttgttggtaaatcgatatgttgtgtcgaaccgttgatatattgaaagaaacaatcgatatatttgaaaaatcgttgatatattcaaaaaatcgctgatatattctccctaataccagattgggtattgagaaatctatgtaacaagttcccattatttaataaggctaagtggcctgagttctacgatagataggaactcaggcttttttatgcaaaaaatttatgaaatctttttggaataaaactgaggacaagaaagagggcgatttctcctaaaatagcgacaatgatattgaataaaaaggtacggaaatttgcagtgatatgagtaagaatcgcgtatttccaataagataagctcatgaaaatcactccttgtagcattttttatagtatataaaatttgtttcgtaaaagtgcgtgtcttagtttgtgatttgcgaaaaaacaaaataaattctcaatataatttcaacaattgagtaataaaacatggaatatattacctgtttaattgcataggaataggagtgtttacaaaaatattttctgaattaacataaaatttacaaaaaactaataaattgttgaaataatacaaacgtaaatatatactctatatatactttttacaaaaaaaggatgtgatgaaatgaattacatgtttacttggtaggataagattgattcattttacaaattcgaaaaaattaagtgaggagaaatgtacatgtttcaatttatgaaatcaccaatcggtatagcggttggagtagcagcggttatattagcgtcaccaaaagcgagaaaggggctaagaaagctagcggtaaaaacagtatctgcttttctcggtgcaaaagaacaaattcaaaatgctagttcagaaatggaagaagctttaccgaaagtaaaagaagcggcacgtaaagtggcagtaaaaacagtatcgccaattattggagcagtagaagctgtaccgacaactatttctaaattccaggaaaaatgggcgtctcgtgtaaatgcatatcattctgagcagagtgtagattacgaaagcatacctgttactccttagatagtaagtgattttacttcctttacaaggataaggaggatgatgatgcagagtaaattattaaaaacgagatttatacgatcgttacctggaagaattcgaattgaaatatataaactaaaatacaacttggacatggcgaacttgatagtagaacgttttcgtgacgtggaaggtatttatcaagtgagtccctctatctctacaggaagagccctgattacttacgatatcaacaagacctctctacataccgtttgtgaaataattaaactcctagaagaacaaactacaaagaatactaactttaacaatattgaagaaacgaagaaagcagaagattcttcatctagtgtaatttcttacgagaaaaaaggtgaaggtgttccattgccactagcgctttctgtcgctggattaggtgcgttcggtataaagcaactatttatgggaagatcagctttagctagaagtccagggcttttttacttgtcgggggctttatctgttttgacgggatacccgtttttaaaacgaggattcaaaaaaatggttgctagcaaaaaagtgaattctgatctagtgcttggcataggaacgcttgcactcgcactagcgcgggaaaatatcgtcgtactagcgggacttagtctattaaattatttaaattggaagcgtagtcaagcgaacataaatgaagagaaagattcgtataaagaaagaattttatccccggagattaaagcatacagtgaaaagcaatcgaaatggggcatgctttttgggggagcaacatgggcctttacgagaaatccactacgcggaatggcggttttattagctgcgaatccgaaacctgcagtttcgtctgctgagtatgcatggcgacaaggagatctcgttgcgagggaaagaggatatcttattccaaatgaaggatcattatctcaactgtcccgaacgagaacaatcgtatttgacgatgtatcgcgtatattctgtcatgaagaagcggagattagctgcatttcagaagatgaagggcaagtttggtgcacggcagcctcactgctggagaaaagtgggcatgattggaaagaggaagttgtgcaacgagcgaagcaaacaggaagaacgttaaggaaagcttttgaaatcgaagttgatgacgaagggataaaaggtgacatacaaggcattccatcctttatcgggagtaaagtatttgtgcagcgaaatggtgtagatataagtgcttatgagttagaagcgaaaggacttggcaaagaaggatttaacgttcagttcgttgctaaaggtaaaaaatgtgtaggattgttagttggatcgaaaatgacgattacacctgaattcacagaaataatgaaagaattaggtgaaaatcagtggaagtttgcagttttgcaaaatagtttacatgtaaatcatagtgttctttcgcagcacggtattgatgcaagttggcaacatagtgatgttgtagagcgtgtggagcgtattcgttcggatggggaagaagtattatttgtttgtgaggataatattgaatttccgtctgtatcttattatgaaatgaaaaatatatttcagtcaatcgcctatgcgaaacaaatcgatttattagtgaaagaacattttcgagtagcgaaaatatggaatattgccggggagatgctggctgtttggtctatattcacggcacctattatcgctttaatggcaaatgctctatctttaacgtttttatctagagcgaagcgagtaagtgagaagattttttctaataaaaagttactgaatatgaaccactcggtagctagagaaacttctacaaaatggtatgcactctcgcaagaagatgtaataaaagatttacaagtggagaaacagcaagggctaagcgctcgagaagtgcaaatgcgacaagaaaagtatggaatgaatagaattgaaccgaagcagtctgttccttggattgtttcatttatggggcaatttaaagagtttacatcgcttattttacttggagcagctggattatctgtattatcaggtggggtgtttgatggattagcgatggggacaattctcgtcgtcaatgcggtaattggaacccttcaagagcgaaaagcagaaaaagtagtagaagctttaaatcaattccgtgcgccaaattgtatagtaacccgtgaaggggaagagatagaggtagcaagtagtgagctcgtcccaggtgatgttgtctgccttcaagctggagaccgcgtacctgcggatcttcgtattatagactcttggaatttagaagttaatgaagcgatgctaacgggtgagtctctaccagttgaaaagaaagtggatgcggtaggggaagaatgttcgttagcggagcagaataatatgctctttatgggcacatccgtaacgcgcggcaaggcgagagctatagtagtggaaaccgggatgagtacagagatgggctatatgatttccttaatgaagggggaagaaacagagcctacaccactacagcaaaaggtgacgtctattagtaaaacctttattaaaggagcatttgtggctggcggtattgtgcttgtagcaggattgctacgcggtttaccgattacgcaaatgattacaacatcagttgctcttacagcatctgctgtgccagaaggtttaccgattatgattacaatcgctttaagtgcaggaatctttcgtatgcaaaagcaaaatgcacttgttcggaagctttctagtttagaaacgttaggtagaacaactgttatttgttctgataaaacaggtactcttacgaagaatgaaatgacagttaaagtcattgccacaccaaatcgtatgtggagtgtatcgggtgatggatatgaaccagttggtacaatatcggatgtaacgtcgtctaaagtcgcagctgctgtagagatggaagtagaagaagcgacttatcatgaaagtgaaaaaacgccgttagaacatccagattttgttcgcgttctgcaaattagtgttctttgtaataatagtaagttagaacatgaagacgatcagtggattgtgaaaggtgacccaactgaaggggctttattaagttttgcttctaaagcgggtgtttcatataaggatatggcatcatttgaacgacatcatgaagaaccgttcgattctgagacgaaaattatgagtgtcgtttgtaaggaaaatgaatcattgtataagttttcgaaaggatctgtagaggcgatccttactagatgtaaatggtatcaacataacggtgaaatctatccgttatgtgataaagaaaaagaggtcattttacaacaaaatgaaggttttgcagaacaggcattacgtgtattaggttttgcgtatagtaatgttgagaataatgaccttatttttgttgggttagttggtatgattgatccgccaaaacctgaagtggaagagagtattcgtgaagcgattgaacttggtgtaaaacctgtcatgattactggggatcatccgactacggcaatttctattgcgaagcagaccggtatttggaatcgtgatgatcgtgttttgacaggggtagaaatcgacaatgtaacagatgaacaattaaaagaaattgtaaaaaatacttctgtttttgctcgcgtaacaccggcacataagttacgtatagtagctgcataccaagcggactgtcaaattgtagcgatgactggggatggtgtaaatgatacacctgctataaagaaagcgaacattggtattgcgatggggcaaacaggaacagaagtaacgaaagaagctgccgatcttatattgaaaaaagatcatttcggttccattgtggaaggggtaaaagaaggtagaacgattattggtaatattcgtaaagcggttggatgtttattgacgggaaatttagctgaagtattagtgacaagtgcggcagttattgcgggaatgccgattccgttagtaccaattcaaattttattaatgaatcttattacagatgctttaccagcgatgattttagctgtaaatcctggaaacaaaacgaagcaaacgaaacgtcaagacattgttgataaagagttgtacaaaaaagttgtaacgcgaggaatactgcttggagcagggtcacttgctttattcggtatgagcttagcggctggcgtgcctcttgcggtagcgcaaacatcagcatttgcagcattagttgcaggtcaacttattcaaacattctcttggagacaagaaggatcggacgaaacgatgcgtgattggtcaaaagatcgtttctttgtgacggcgttaggaacgtcttggcttgtattattatcagctatatatgttccgccatttgctcgtatattccataccgctccattaacatttatgcaatgggtacctgttctttttgtagctggtacagtatctcaaatttcaaaacctattattaaattaatctcatataagaatgatgactcgaaaaagttggtagttaatgaactagcattattaaaaacagtgtaaaggagtaatgaaaatgatacgaaaaattgttattggatctactttagcgttagcaagtgccgctttattacctgttgtaagaaatacactccgtccacttgttgaatcaggtgcaaaaggtgtgaagtctacttttgaaacgattaaagaagaagtggaagatattattgtagaagcgaaaatggatagaatgcaaaaacaattcgagaaagaactttcttatgttgaagaagaacattctaatgaacaagagataattgaagcagctgcaaaggttgaggaaaaggaggaagtaagaaatgacgcataaagctgttgaacaagatgtggattaccatttagaaaaagcgttagtacattttgaacaggcgctagacttgagtgtaaaagcggcatctgaaaataaggcgatgcaaaaagagattgctactaaaatgggatcttttacgggagatatctttcaatccgttcgtgaaaaaggaaaagtgaatcgcatgaatataatgaagtggttcactctaccccgtttttaaacagagctgttaagtggaaggaatatagggagttattttctccctatattcatattccatgctatgtatgtcacgttagtttccgggatgttcaacaatacgaaggggtgaacgaaatggcagcatggatgatggtattagcgctaacgttttcatcaagtattgacaacttaggggtagggatttcttatggcattcgaaatataaaaattagtcatctatcaaattttattatttcggtaatttgctttttatttagtgtagtaggaatatattttggcttatggctatcaaaaattttacctgggataatgccggttgtaatcggttcgttcttattagttataatcggtctccgaatcatcttactagcaattcctcggaaggtttcggtgcaagagattgaaggagaagtgggggacactgaaataaatggcttaacgaaaaatatcggtaaatctggggaaatcggttttgtggagtctatttttcttgggattggtttatctgctaatgcgctcacaaatggattaggagcgggtttgttcggtttgaatccaattgctatttgtattgcagctgcagttggtagttttattacagtatggggcggagttgtgttgggaagaaagatagctcacgttcgcatcggtaaattcactttaggtcagtttggtacattgattagtggaacattattattagttattgcctttgctgcattttttgattaattcatagaaggtgagtgaaagtgagattactgtataaaagactgaaatattctgaattagaatcggagttacaattagtagaaagtgttttaagttcggggtattttattttattggatttaatcttcgtatctttcttattaatggtactgaccttttctatgcatcattcattttttatagcaattgtcacattcgtgagttcttacataatttgtggtagtgtatttttattattacggaaatggttaaaatgagttgaaaagctatcttaattttttaagatagcttttttgtttacaaaatgtaaacatataaaggacttctatcttgtaaatagtcgaaaaaatttgttaatatgaattgtatagagattatagttgtttttcttataataactatggttattctcgtgaataaaggggaatgagatatgtctcaagataatgaaaaaagtaatcttggattgttgttgaaaaagttacttaaggaaaagtctttatcgatgcgaaagcttagtttgcttactgaaattgatacggctactatttcaatgattgtaaatggtaagcgaaaggcaaatccgaagcatttgcaaaagttcgcggagagtcttggtgttccagttggtgatttgtttgtggcagcaggctattctattgaaacgaaacaggaggagcaatcggatattcatgtttccattaataacattgaacatttacttgaatccgcacagctctatgatcaaaagtttagtatatcgaatgtagagcagcaattaacgaattatgaacaatattcgcaaacagaagaaggcaaagaaacgattgaaaaggggtttcttgaaaagattcaaaaggtaagcagtattggcccgtttattaatgatttaaaagaattgtatgaaagatttacgaagaagaagggaacgactgcagaacttgctttaatgggaagtgcgctgatctactttatattatcggtcgatgtaattccggattatatatttccaatcggctatttagatgatgcggttgcagtacaactcgttttaaatgcactaatgaaaaggtaagatgtttatatgaatagatagataaggatatttacataccaatagtttgagataattgtatcgttatgaatatacgaaaaaggtgtaccccgtgttagaacggagtacacctttttcgttttaatttgccgattcttctacatactcataagctttctcaccatgcatcgaaatatcaagtcccatgtgttcctcgtgctcatctactcgaacggggaggaaaaagctaataactttaataatggtgtacgtcattatgattgtaaaggcataggttgccccgattgctacaagttgtttaaacagtaacgcggcgtttccgtaaaacaatccgttcgcaccatccccgtttacggcagtagttgcaaatagtcctgttgcaataccgccccaagttcctccgatgccgtggcatccaaaggcatcaagtgtatcgtcatacccgaattttgtttttaagaagaaaacggcgccaaagcataatataccaccaattgctccgataagaagggcggagaaaggtgtaacgaacccgcaagctggtgtaatagcgactagaccagaaacaactccgcaagcagctcccattgcggtcggttttgattggaagaaccattcagaaagcatccaagttagagccgaggcagcggcggctatatttgtattaataaatgcagttaacgctacgtcgtttaaggataatgcgctgccgacgttaaagccgaaccagccaaaccataataaacctgcgcctaacattgtaaatggcaaatggtgaggagaagaaccatttatgttttttcgttttccaaggaaaatagctaatacaagaccagcaactccggaagtgatgtgaacgacgtttccgccagcgaagtctagggcgccaagttcccttagccacccaccgacgccccatacccaatgagcgacaggattgtaaacgattgttgtccatagaaggataaaaataagaaaggcagaaaatcgcattctttcagcaaatgcacctgaaattaaagctggagttaaaatggcgaacatgagttgaaacatcatgaataaattgtgaggaatagtagatgagtagtctggatttggtgcgtaggtaactccgtttagaccgaaccaatcaagtgtaccgataagcccgtgccaatctggtccgaatgataaagaatagccgataacaatccattgaatcgaaacgatagccattgcactataactatgcatcgttgtactgagtacatttttgctgcgaaccatacctccataaaaaagtgccaatcctggtgtcatcaacatgaccattactgtcgccataaacataaaaactgtatctcccatatccatgatctctcctcctataatgttagaaaaaataacatatatttgttatgtttcatatcatattcgaaattaaaccgaaaatcaactaaaaattcagaagattatatatatgatgtaataaaacctaacatgaattattttgtgaggattaaaatcgacatatgcgcttcattcagaaaattggtataatattcttacaattaaagaacttgggggatgcgtgtgggaaaaatacggactaggaaactattcatttgtttttgcttagctgttgttttgtttgtaccaatacatacttttgcagacgaaaaaagagagtggcgagatgaagttatatactccattatgattgatcgcttcaataatggagaaccgaaaaatgacaagcagttagaagttggtaatttagaagggtatcaaggcggggatataagaggaattataaaaaggttggattacataaaagaaatgggttttactaccgttatgctttcgccgctttttgaaagtggaaagtacgatggattagacgtgcaaaattttaaaaaggtaaatgaacatttcgggacagacaatgatgtgaaagaacttgtaaaagaagctcatgcaaaaggaatgaaagttgtatttcaatttccacttggagaaaacgaacgacaggtaattgacgcaatgaaatggtggataaaagaagttgatttagacggaagctatgttatacatagtgaaaaaaagccgcgttccttttgggataacgcgcaaaaagatatgcaagtgataaagaaagattttcgtattatgacaaaggaggatggtgaatacaacgaaaaaatagtagaatcgttttctaaagcagatgtatcggtgaaatcgttatacgatgtgagtaaaaaagaaggagaatttgttacgtttttagatgatcaagaaacaaaaagatatgcgcgtattgcaaaagaaaatatgtattatccgccatcacgtttaaaactggcgcttacttatttgttaacatcacctggaattccgaatttttattacggaactgaaattgcattagatggaggaagtgtacccgataatagacgattaatggattttaagtcagacgaaaaatttatgcagcacataacaaaactaggtgaacttaggcaggcgagaccgtctttacgacgcggtacgtttgagcttctgtatgataagagcgggatgagcatactaaaacgaaaatataaagatgaagtaactttagtagcaattaataatacgaaagaaacacaaaaagtctccttacctgcaagtgcaattggtgaaaaacaagagttaagaggattgttgcaggatgaaattataagagagggaaacggaaaattttatctcgttttaaagcgtgaagaatcaaacgtgtataaagttaacggagaaacaggtgtgaattggttatttatctccttaatcgttggtgtgaatgtattatttattgcgtttttaattgcagttaaaaggaaacgtagatgagaagttgctggctctatgttcatgtcttcttattgtatatgtaagtttgttcggtggcgcgatagtatttattctgttgatatgaaatttcttaagagaaacgatgtgagaatgaaaacgtccctagtgagaggagggccaggttaggaaggggatgttcttcctaacctgttttttgtgttagcaccgatagggaagaatctttgaagcaatcaataattgtaactatattgattttacattacattaaaagttagagaatactcttatactaatacagtgctaaatagtaggtggaaaatggaattttacgatttgggtattaccattaaagagcttagaattaaaaaaatatatcacaatccgaattatgtcatggaatatgttcacaaagtcaaattagctattaatctaaatactttatacttattaggtgaactttactatttaaagggatggaatttattgagatttaaacaacagaatgaagaagatattgcaaataacatgaaaaaagcattatttatatttgaactaacagaaaaagaaaatctgataaaaatggttaaagaaaaatattttgaaaaccaaaatgaaaaaagccactcataattcatttggggattacttgaaatataatagaacctacagggaaaatccctgtaggttctaaacttataaactttcttctaaaatattagtgtttaatataaatttttgaataagagtttacttagtgtactttttattttgaagtctgcatctttattaaccatttatgcttctttttaactccatccaaatataattaaaattaagatggttcaagtcggaggaaggcgctttgaggtgtctttttttatgacttttatcattaactatttaatgttttttaaatgattacatgacatagtttttttgtaccaagctttgttgatacagttagacttatccgttagtgaattcgcattattagaacatcctacagtatttagggagaatgtggccaataaaaaccatagtattaatttcttcatataaccacttctaactcttttttaattaacattttttaagttccttattaattttacaatacattaaaggttgggaaatattcttatactcataaattgttacgttttggcggggggaggaattatgagttacagcgatttttaagatgactttggtctagggtgtagttactaagaaaagtaattcaaatcgaagggggaaacgtcttgaggtgtctttttcttattttcaataaggtctgctaaatacatgtataaaacaaattctacaataaggcctagtttaatcatacggtcacttgtaaagtgtgcgtatggttagaccctgttcacttagcgattttcaccgcatatacctttttctatagtttgttctcgtaatattgtctctacaagacaaaaaagaaaactcctctaattaagaggagttttctttttagcggtagttaatgaactgtacgtcgattggtaaatcagcgctacgaacagctgcgattactgcttgtaagtcatcacggctttttgctgtaacgcgtacttgatcatcttgtacttgtgtttttacttttaatttcatttctttaatgatgttgttaatttttttcgcgttatctttatcgataccttgttgaagtgttgcgcgttggcgaacagtgttgccagttgcagcttcaacttttccgtaatctaagttcttaattggaacgttacgttttacaagtttagagataagaacgtcttttacttgctctaatttaaactcgtcatcagaagttaaaacaagtacttctttttctaatttaatatcacttttacttcctttaaagtcatatcggttctggatttcttttaatgcgatattaattgcgtttgttacttcaggtaattctactttcgaaacgatgtcaaaagaactatcttttgccatagttagcacctccaaataaatttctaatctttttatgtactgtacatactaaagtatagctgaaaacgagtctagacttaagtgttttcgtacttatattcatgtaacctcattttattatagtgaattttgggcagttggacaaatataggaaaaatcatgttataattaacttttgtttggaatgataaaaaagataattttatatatatagaagggaattaaaaaatatgtatttgcaaataggatcgattgaacaggtaactgttttacgcgaaacggaaatcggatatatggttgggaatgaagaagaagaaattttcctacataaaaacgaagtggctggagaaattgaagaaggcgatacgattgatgtattcttataccttgatcaccaaaatcgtatttcagcaacaatgaaggaaccaattattacaacttatgattggaactgggtaaaggttgtagaagttattcctagtttaggtgtgtttgttgatattggtgtgtcaaaagatatactaattccagctgatgagttcccgatttatatgccggtatggccagaagtaggcgacgaattatattgtacgttaaaattaacgaatcgtgatcgtttaattgctcttccggcaagagacagtgatatgcaagaaattatcgtagatgcaacgccatctatgcgtaataaaaacgtaaacggacgtgtatatcgttcacttcaagttggttcattcatactaacggatgagcatttccgtgctttcctacaccatacagaaagaaaagaacaagtccgcatcggtcagcgtgtaacgggccgtattattgacgtaaaagatgacggtacaattaacatttcacttcttcctcgtaaagaagaaggaatggaagatgatgctgcagtaatttatgcatatatggaagaacgaggcggagcaatgccgttttgggataagagccatccagaagatattaaagaacgctttaacatgagtaaagctgcatttaagcgcgcacttggtaagttgatgaaagaagaaaaggtttaccaagaagaaggttggacgtactttaagaaataaggtggatgaaaaaagaactattctttctctgaatttttaagagaagggatagttctttttatttttaataatgtattcgctctataaggtagatattgtgaaagaagtaggcaggatggaaactaaagttatagaagaggtatgttataaagttttaaaaatatatggttaattattatgtagttttttaagtgagattttgattgtagtatttcttatgtgattcattaaaaaggctaaaagaatataagagatttatcgcagtgtttgtactgcctatcctgctatttgccgggcagtaagatcatcactgattaaagtttcattttatgtataaaattgtgatagcttttacactgtgttttgaatttttacaacgctgacagtattaaaaatataaaataattaggatgattatatgcatatttggatactaacaaattggcggaaatattataatctagaagagaagagtcatcgcatgggactacgagtaaaattcgataaagatgttgatcctgaagtgagaagagctattaaagagttttgtaaatggatacgccgagaatatttttttccaattagagtacctatttatgtaaaatcttcatataaaataaaggcgatggatggtgagttggtctatggtactttctttgaaccatttgatcgaaatgatgagccgtatattcgtatttcgacaggagattattacgatgagctagagaaaagagggaaagatgacgctttgggaggatatttgtttactattgcgcatgaactaacacattattttcaatggattaatgatataagactaacgagaattggatatgagaggcaggctactgcttattcaggatatattattgatgagtataaagaaactagagagcatccgtgaaatagaaactttatggataattggaagtatgataattagcaatgggcttgaatgaatgccctaatatttaggggctatccgggattagatatctgagttattaaacaaaaataagtgtgggtaatacgctttgacgaaaaggtgtgtatatgaaattttataacgcagtatatcttataatttcttatgatgatgagatattgaaagagaggtacgaaaatgcaagataatgtactggaacaattgataaagagtctctcggtattatcccttgaaaaagaacacgaaatagcagcagttgatttacatgatatatatgagagcactgaaagattcgaacaattacttgaaaatattatgaactcacaacagtctaaagaagaattaatagatgcgctaattgaagtggagatagaattagatcacatcaattggcattacaaaagcttgaagaaaaagttggaaatattgatgaaagattaaaaagcacaaccttatttaaaaaaataaggttgtgcttttttaatttccttgcggagaaacaagagtaaatgtatctttcaaatcactatcatttattttaatatttgccttttttaattcctcttgtaacaattttttgctgaatacaggatcagcagtacgttcttcctctaagtttttgcgaatagagttttttacctcatcgtaaggttttaaatcttttttatcagttaatttaataacgtgataaccgtttgatgattttacgggattgctaatttgtccaacatttagtttgtaggcagccctttcgaattcaggagccattgtacctgaattgaagtatccaaggtctccgcctttatcttttgatagtagatcttgtgattcttgttttgctaattcttcaaatgaagcaccagcatctagtttactctttatttctttcgcttcattttcgtcacttactaaaatgtgactcgctttaatttctggcttatagtggtcttttacgtctttctctgtaatgcttttcttaatcgcttcattcatagcaagtttgaacttaatttgatttttgaaatcctcttcatcttttaaaccattattttctaatacttttttgaattgatctccatattgtttttttactttttctacttctttatttacctcttcatcagatactttatatttttttgtgatgacgtcttgtgccatcatttcgtatagcatgtcttttccgtaacgatctttcaattgtttttcgaagttatcctttgtaatggtcgagtctgttgctgtagcgactgtagctgagccgtttttttgtccgcaagcagataacatcaatatacttattagtgcagtaataatgaaaatatgtttccctctcatgccaacacctcatccgaatatgttatcgctattgtagaatatagaagtgaacatgaagtgaatttttaatgtttttttcctttaaaatgtaaaaaagtacatcaacataattgttgatgtacgatggaatcaaaggtgatcggtctttttagagtatgcacgtttaccttgctgaatatttttttgctcttgctcatttttttgctcttgctcatttttttgtgtgcgttttgcgttattatcgcgtgcttttttgtcgttatcactcgtatgtggcatatgtatcaactccatttctaaacgttgtacgtttatcatttcctttttcgtaaagactatgtatagcggtgcatttatgaagggtaaaggtggattcgaaatggatttgaagttgaattatactgaacttataaagaagttaatcgttgtaatcatcgcaggtttattaaacgcgattgggatgaatttatttttaacgccagcaaaagtgtatgcgagcggctttgctggattgtctcaattattatcacaaatattaggtgattttttatcgattcacatatctacgggagtattgtttagcttatttaatattcctgtcgttattttagcgtggaaaaaggttggaaaggccttcaccttttttagttttctttgtgttatatttatgactctgtttctagaaatcatccctgttagagcggtttcgaatgatatcatattaaatgcgatttttggcgggattatttcggcaattggagtagggattgctttaaagtggggtgcttctacaggtggattagatattatcgccatgattttatcaaaaataaaagataagcctgtcggtacatactttttcttttttaatgcaattatcattatcgctgctggctatgtatatggatgggaaaaagcgttgtatacgctagtgactttatatgtatcaacgagaattattgatgcaattcatactcgtcatgtaaagattacagcattaattgttacgaagaatggggcagacgtaagaaaggcgattcactcgcgattagtaagagggattacaacgataccagcaacaggtgcttatacgaatgaaaataaagaaatgttaatgatggttattacccgttacgagttatacgaattagagaggattattagacaagtggacccaggtgcatttacaaatatactgcaaacagttggggtgttcggattgtttcggaaagattaaagaggaccaaagttggtcctcttttttaatgtaaattcgtaatgttttgcaattgctcttgcatttcacggagctgaactttttcagcagttgaagagtttgcgtaagcggattgcaaagcattttttgctctatacacgagatcttgttgctcagtaccgcttgaacaagatacggcattttcaacagcatctctagcttgttggaatagtaagttccccatttaaacccctccaaaagaagagttacttcttgctttttctgcctcagctaatgtacctctgtacgggaatcttgcatcatgcttcataacagcatcggctccttgttggataaaacgttttgatttgttctttttacccattcgaaaaaccccctttatttagctgaaaacaatcgacgcaatgtctcatgcgtctacttatagtatggacatttggcaggaaactataagtagggaatttttagattacaacccaagaacctcttctaaatataaagcaataccatcttcttcgttcgttaacgtcgtatggtttgcgagtgattttaattcagggatggcatttcccattgcgatgccatgaccagcaaattcaatcatttcaaaatcattatcttcatcaccgaaagcgataatgcgctcttgtggaatgttgtaatgactagaaattttttgtaatccaactgctttatttaatccgcttttcacaatttcaataatcggccaaggtgcgccccattttctatggtcgattacttccgcatgcatatccgttaaatgttgacgaattgcagtagaatgctcgtcatgtgcgtcaattaataagcaagttggatgatcgtttaaaatatttaataagtctccggtaaaaatcttaggagagccgaattcgaaaatatgttttttatcttcatcaatttcacgaacatacacatcgtccattacttccgcgtatatattttttacgccaaaatcaaagcaagctcggacaatttcttgcgctgttgctagctcaagaggagagtgatgtgttccccagtttgaatcaagaggatgatgtacgtaagcgccgttaaagtttacgataggtgtgttaagatcaagttctttatagtaatcgtaactagcacggaatggacgtcctgttgaaataacaacaatatgtccctgttcctttgcttttgcaattgtatgtttcgttcgagtggaaattattttgttgtctgttaataaagtgccgtctaagtctaatgcgattaaatgttgtttgttcataatttcacctcttataataatttttttgtatctatctgtatttccgtttttaatatgcagaaataagaggttaggctcggtgaaatcaccatagatggaaatttcactatatatccatcttacgtctcaaagtgctgtggtgtctactatttatcgttggaaattaagaaaagtcaacatctttttagaaagttcaaacaatgtttctttcattatgtacaaattgtgaaaagggttacattgctcgtgtggtgaggcatataatgaacatgtaatcttctcgtatatgtttgactctcctttgaaactagcctagagtaggttggtttctttttttttctacaagtaggaaagaaatccctgcttacgcttgtgtcattcatatatatgtacaagaatgagatgtagtactgtttcctaaacatgacagaaaagctttcttttaaaatggatatactaatgaggcaagacgtcatggaaggagaatgaagatgggacaaaatcgcaggtttcgttctggacaaaaagcgccgaatgatggcatttacgtagaaattggtgaaacgggaagtatggtgaaagatccgcaaatggtgaaattaactgccggtgaaaagtttccggataacacgaatcataaccgccagtggacatataaaagaaaaccgtaacagaagccgcaatcattattgcggcttttttgtcgttacacattgtaatttcatttaccgtattttttagcagtataatgaatgctctctttttctttttcaaataataagtttgaaaatacataggcaaaattattgtataaaaaagtcagttggcgtataatcaaatcaaaggtcaaagaaagtcaaacttttggagggctgtaaagatggacttaaatcaaatgacaacaaaaacacaagaggcgattatgagtgcccaatctttagcggtatctcatcatcaccaagaggtggatactgttcatctattacttgcattattagaagagcaagatggattagcagtacgtatatttcaaaaaatgaatgttgatatagaagcattaaagcaaggtgctgaaagtttaattaaaaagaaaccttctgtaacggggagcggtgcagaagttggaaaattgtatgtaacgagcgctctgcaacaactgcttgtaagagcagggaaagaagcagaaaaactgcaggatgattacatttcagtagaacatgtgttgcttgctttttctgaagaaaaaggcgatataaatcaattatttacaagattgcatattacgaaagataacttattacagtctttaatgacagttcgggggaatcaaagagtgacgagtcaaaatccagaagcaacttatgaagcgttagaaaaatatggtcgtgatttagtggcggaagtgagagcagggaaaatcgatcctgtaatcggccgtgatagtgaaatacgacgtgtaatccgtattctttcacgtaaaacgaaaaacaatccggttttaattggggagccaggtgttggtaaaacagcaatcgttgaagggctagcccagcgtattgtgaaaaaggatgtacctgaaggattgaaagatagaacgatttttgcgttagatatgagtgcactcgtagctggtgcgaaattccgtggtgagttcgaagagcgtctgcaagctgtattaaatgaaattaaaaagagtgaaggacgcattttattattcattgatgaacttcatacaatagttggagctggtaaaacagaaggagccatggatgcaggaaatatgttaaaaccgatgcttgcgcgtggtgaactgcattgtatcggggcgacgacgctcgatgaatatcgcaaatatattgagaaagatccagcgctagaaagacgtttccaacaagtattagcagaagaaccaactgttgaagatacaatttcaattttacgtggattaaaagaacgctttgaaatttatcacggtgtaaatattcatgaccgtgcgattgtagcagcgtcagttttatcagatcgatatatttcagatcgattcttacctgataaagcaattgaccttgttgatgaagcgtgtgcaacaattcgtacagaaatcgattctatgccaacagaattagatgaagtaacgcgccgcattatgcagctggaaattgaagaagcggctcttggaaaagaaacggatcgtggtagccaagagcgtctaaaaacattgcaacgtgaattatcggatttaaaagaagttgcaagtggtatgagagcaaagtgggagaaagaaaaagaagacattcacaaagttcgtgacttacgtgaacatttagaacgtctgcgtcgtgaattagaagaagcagaaggtaattacgatttaaataaagcagccgaacttcgtcacgggaaaattccagcaattgaaaaagagttaaaagaagcggaagaaatgggcgcgcataataaacaagaaaatcgtttattacgtgaggaagtaagtgaagaagaaattgcagatattgtttcacgctggacgggtattcctgttgcgaaactcgtggaaggtgaacgcgagaaattattacgcttagagcaaatcttatcagagcgtgtcatcggacaagaggaagcagtaagcttagtgtcagacgcagttcttcgtgctcgcgctggtattaaagatccgaaccgcccgattggttctttcatcttcttaggaccaacaggtgttggtaaaacagaacttgcaaaaacgttagcgcagtctttattcgatagtgaagagcaaatgattcgcattgacatgtctgagtatatggagaaacacgcagtgtcacgcttaattggtgcacctcctggatatgtaggatatgaggaaggtggtcaattaacagaagcggtaagacgtaaaccatattccgttgttttattagatgaaattgaaaaagcacatccagaagtattcaacattttattacaaatgttagatgatgggcgcattacagattcgcaaggtcgtacagtggactttaaaaatacagttattattatgacttcaaatattggatctgctcatttactagatggattagaagaagatggttcgattaaagaggaatcaagagatcttgtaatgggacaattaagaggacatttccgccctgaatttttaaaccgtgttgatgaaattattttattcaaacctcttacaacgaatgaaattaaaggcattgttgataaaattgtaaaagaactacaaggtcgtctagctgaccgtcacattacagtagaattaacagatgcagcaaaagaatttgttgtagaagctggtttcgacccaatgtacggagctcgtccattaaaacgatacgtacagcgtcaagtggaaacgaaattagcacgagaattaattgcaggaacaattactgacaatagtcacgtagttgttgatgtagaaaataacgaattagtcgttcatgtgaaataaaaataaaaaagagttcggataaaatccggactctttttttagtgttgttctactggctcgtttggaattgcagctgaaattgctagtactaacacagcaagaacaactgagaaaatagacgcttggttaaagtcgtatgtaccgccagtcatagagccgattacatagctcatcatatgtacaagtaagaacgaccaaattaatgcccaaatgaaacgcatattttacacctctattcgttcaatctgtccttattgtaacacaattgaaaaaagaatatagaaaaatatttgtagatttttcaacgcaaatttgcattccgttcatacattataaaagagtacttttatatgtttagaaaataaggcgggggaaaaatgagtattacggaacgttttttttacttagaaaaagaaccatgtgtcatttatttaccggagaagccaaatggattttctgttatgctcctcggtgattataactactttattgagaatggtacaagtttatggacacaacatgcgggtaaatcttattttttacatggtcttattgaacaaggctacacggtcttttcctctaatttatacggaagacattggggaaacgatcaatctgttcgtctggcaaaacgtttatatgatgttgttttgagaaaagagacgttaaatgcgaaaatgcacattatggcagatggtatgggagcgcttgtagcacttgaaatgatgaacaaatatcctgaatgtattcgttctgttgttatgctaaatccgtgtttagatttaccagaatatgtaagttttgagaaagagcataaatttttttacaagagactcgtgaaggaattaagtttggcgtatgatgccaaagaagaagaattagaatcaaaaataaataagaaatcatttacgcttcttccatcttgtgtacctgttaaaattttcgtatcaacacaagaaaaaagaggaagaaaacagcagttgcgtagatatgagaaaatgaggcaactaaatcaatgtgatacttctgtcttgttccatctgcaagatgtgaaatataaaatggttaggcaaacgactgatttctttaaaaaatatgaagaagaattatgaagctcccatatacataaatgaggagctatttgtttcagagggaaaggattggtggtatggaacgcgtgctgataataggtgcacttacgtttgtaggttatcaccttgtaaataaaatgattgcagaagaagtggaagtctatggtcttgattttgatgaattcgatagtatgaccaaaattaatgaagagaagttattattaattgggcgaaatgcgttatttacgtattattcgataagagatgaagatggatggagatcggttgaggaagagagattcgatactgtttatttttgcttatatgagccaaatcagcaaagtggatttcggaatgaaagagtcatattacaatatttaaagcgaattataagaatgtgtgaagaacaaaaagtgaagttaaatttaatttcttctattgaagtaggcagtacagatgaatccgaaaataagcgcctatttttgaaagtagaagaaggattgaaaaaagggaatttacaatatagtgtatttcgagttccaacattatatggaccgtggcaaccgtcctttatgatgtttcatcagcttattttatcagaattagttgaaaaagagtgccgttgtacgattgaggaaaaggggaatgatttactttacgttgaagatgtatgtgaatacttatgggaacatggaacgaacggggcgcatcttggtatatacaatttacttagtggtaaacagtcattatgggaaaaaggtatgaatcttttacgcgcggatgataaagtaaataaaaataacagcgaagtaagagatgaggctatcgaagtaatttcgataaaaagaaatactccgttagaatacggtttaaataagcaactggcacacatgaaaaaatataaagagttatacgaagggtagtacgcgtgttacactattgtatgtgaaagttttaatggagaggaagagtataatatgaacgaaaaaagcatgcagtttttacaaatcgcaatgaagcatttaccggaagcaaaggcaattttagatgataatggaattgcacttgatatggagaaggcacagccggtgttagagttgttaatgaaagttatgaacgaagcttacgagcttgggaaagcagataaagaataaaaagcatctttttaagatggaagagaggcccgaaccgtggatagaagcggtcagggccttttttattctcgcctgggggaaaaccagagatatgaagaggataaaggaaaagtagtgaggagaactgtctagtttagaaggaaagcagataaagaataaaaagcatctttttaaggtggaagagaggctcgaaccgtggatagaagcggtcagggccttttttattctcgcctgggggaaaaccagagatatgaagaggataaaggaaaagtagtgaggagaactgtctagtttagaaggaaagcagataaagaataaaaagcatctttttaaggtggaagagaggctcgaaccgtggatagaagcggtcagggccttttttattctcgcctgggggaaaaccagagatatgaagaggataaaggaaaggtagtgaggagaactctctagtttagaagaaaagcagataaagaataaaaaacatctttttagatggaagagaggctcgaaccgtgaacagaagggtttgagtctttttatatttgagaggtatgtttctgtttcttttaatgaaaaataaagtggataatgcgttagctttctgttttatgcgaaatatattctagacaaaaatacatttatgttttaaaattagtaccaagtcataataattgatataaaacggagggctgcgatgtgaacgtgggcattttagggatcggaagatatgtgccagaaaaagtagtcacaaatcacgatttagaaaaaataatggatacatccgatgaatggattcgtacgagaacgggaattgcagaaagacgcattgccgatgatacaatagatacttcatatatggccgtagaggctgcaaaaaaagcacttgaagatgcaggggttagcggagaagatatcgatcttattttagtggcgacagtaacaccagatcgtgcgtttccagcagtagcttgtgtcattcaagaagcgattggagcgaaacatgcagctgcaatggatgtaggtgcagcatgcgctggttttatgtacggaatgattacagcgcagcaatttattcaaacggggacttataaaaacgtattagtagttggtagtgataagctatctaaaattgtagactggaatgatcgaaatacagcggtattatttggagacggagccggtgctatcgtaatgggagcagtttcagaaggaagaggcgttctatctttcgaattaggagcagacggaagcggcggtaagcatctatatcaagacgagtatgttatgatgaatggcagagaagtctttaaatttgccgttcgtcaacttggtgaatcttgtcttcgcgtgctggataaggctggtcttacaaaagaggatgtggatttcttagtaccgcatcaagcgaatattcgtattatggaatctgcaagagagagattaaatttaccacaagaaaaaatgagtatgacaattgaaaagtttggtaatacatcagcttcttcaattccaattgcaatggtagaggaattgcaaaatggacgtattcaagatggtgatttaattatacttgttggttttggtggcggattaacatggggagcagtcgctcttcgttggggtaaataaggactgagagaaaaaaaggagtgtattttgtatggaaaaaaagagggtcgtaattacaggactaggagctgttacaccggtcggaacagatgttgaaacagcatgggaaaacattaaaaagggtgtatctggaatcggacgacttacaagaattgatccggaactatttccagcaaaagtagcagcagaaattaacgactttgaagtcgagaaatatattgataaaaaagaagcgcgccgtatggaccgctttacacaatatgcagtagcagcagcgaaaatggcagttgcagatgcaaagcttgaaattacagaagaaaacggacctcgaattggtgtatggattggatcaggtattggcggtatggaaacatacgaagaacaatttaagatttttactgagaaaggcccacgccgcgtgagcccattcttcgtaccgatgatgattccggatatggcagcaggtcaagtatcaatcgcaacaggagcaaaaggaattaacacttgttctgtaacggcttgtgcatctggtgcaaactcaattggtgatgcatttaaagcaattcagcgtggtgatgctgatgcaatgattacaggcggagcagaagcaccgctaacaagtatggcattcgcaggatttagctcagcgaaagcattaacatttaatgaagacccagcaacggcttgccgtccatttgataaaaaccgtagcggttttgtaatgggtgaaggctcaggtattctaattcttgaagaattagagcacgcattagcgcgtggtgctcacatttacgcggaaattgctggttatggtgcaactggagatgcgttccatattacaatgcctgctcctggtggtgaaggcggagtgcgtgcaatgcgtcaagctttagctgatgcaggcctacagccagaagatattgattacattaatgcgcatggtacaagtacggatgcgaatgaaaaatatgaaacgatggcaattaaagaaactttcggtgagcacgcgtataaagtagcgattagctcaacgaaatcaatgacaggtcacttattaggagcagctggtgctgttgaagcgattttctctattaaatcaattacagacggagtaattccgccaacaattaactatgagacaccagatccagaatgtgacttagattacgtaccgaatcaagcgagacaccaagaagtaaatgcagtattaagtaactcattaggatttggtggtcataacgcagtgttagtatttaaatcgtataaataatagatgaaataaggagttttttcgcaatatattgcgaaaaaactccttatttatttttacgcctttttctcctgtagcatatacataagaaaaaggagggataaagatggggattgttgaaacagctgaatggctacatttatattatgggcggccagaaaaactttgtgagaaatttacgaagtatattccgttgccaaaagaaaggttgtatcgctttttaatttcaaaagggatgtatcgcccgattatgcgcggagaaaaggaaattaaagaattagaggaaaaggaaatttggaaagaattgagcctggagtatgataaactgaaaaactggttaaaaggtccagatgtccctgtctttattttattatcagattcctataatcgaactgtacaagaagagtataacggtagggctggattatctatgcgtcatgttattttcttattcgtatgtggacggaattcggtagaagaattaaaagtgttattagcgcatgaatatcatcacatatgcaggttacatcaaattgagacgaaagaaacagaatatacattacttgatacgatgattatggaagggctagctgaacaagcagtaacagaaaggtatacagaaaaaaacaatgcaccgtggacggcgtatctttcaaaggaagaggctatttattattggaaaaatattgtacatgaaagaataagtataaaacgaggaacaagggaacatgacatcttattaaatggctttcactcttatccgaagatgcttggctatgcgcttggatttcatattgtcaaagattgtgtaactttggaaggagaagatacactttctttattatctatagatgcaaaagaaatattgaataaagcaagtacatttcatatataaaaaaacaggagttctatttcctgtttttttagtattaatagaagaaaaaataataattagaatatatttcctcaagtggaataaagttaagcaaaaatgaacataatgattggtacaaacagtagtgaagtgaggggtagtgaatgttatatctacatgatgtatgggtaaattggtttgaaggtgaagaaaatgggtataacgtttgtcatttttacgaatggcggaaagatgatacgattgagctattagatcaagtgccattattaaaagtagatgccacattatatcattacatcgagaacgaattgttagagcttccgcaaaaaatgctggaagacgtacatcataaggcttatattcgtaaaaatcatgaacgtttgcagcaagagtattgctttgttgttacagatggaaaaggaattattgcgattgacacaattggttacaatgtaccaattcgcaaaagcagacttataccacgccaagagcagatggtatatgagatggtagaaaacgtacaagcagaaaagtatgagttccaagtagaagaaacagaaaaagaacatcacattttatcaccatcgcctttcattatgaatggcttgactcgtaaagaaagacagctaaaacaattattatttatggcgttagatcaattacatacaacgaaaaatacagcagaaattcgctattggttcacagagtgggatccatcagcatatggaatggttcaacatatggaatttgaagatatttgggttaagctgtatgatgaagcgaaaacaggctggtctgataagcatgaacaattatgcgagcgtctcgtaaaaggacagccattttttgaaaagttatgggaaatggaaaatgagcaaaaggtaaattaaaaaaccgccaattggcggttttttaattttgtagtaatccagctccagcggcaagaatgttcggtggcttcgcgccttcctgcgaggcaaaaagcgcctctacgtcaggagctccatccccctcacattctaaacgagccgcctccaccttatatgtaatccagctccagcggcaagctcttcgtgtctaagaaccttccgcataagaaggaaaaaagctccttttatgcgaaagaaccttagccagtcagagctgaacgagccgcttccactttatatgttacctacgttttctgcttagtcccattgcgttttctactttgcgtagttgtttgaatgcaacgcggtttgctttttctgcacctttgtctagaatttcgtctagttctggtgagttgattagttcgttatatttgtcttggattggacgaattgcttctacgactacttgcgctaggtcgcctttgaagtcgccgtatccttttccttcgtacattgcttcaatttcttcaactgtttttccagagaatgaagagtagattgttaataagttagagataccaggtttgttttctttatcaaatttcacaataccttcagagtcagtaacagcactcttaattttcttttcaattgtttttggttcatcaagcatactgatcattgattttggattcggatcagatttactcattttcttcgtaggttctgttaatgacataacgcgagcgcctacttttggaatacgaatttcaggaattgtgaacacttcacggaagcgtttgttgaaacgctctgctaggtcgcgtgttaattccatatgttgcttttggtcatcaccaactggtacgatttcagtgttgtaaagtaaaatatcagcagccattaatggtggatacgtaagtaatccagctggaactgaatctctacccgaagctttatctttatattgcgtcatacgttctaattctccaacgtaagcaacagattgcatgatccatcctaattgagcgtgtgctggtacttctgattgtacaaataaagtagctttttcaggatcgatgccgcatgctacataaagtgcagcaagactgcggatgtttttacgaagtccgacgggatcttgaggtactgtaatcgcatgttggtttacaatacagaaataacagtcgtgttcattttgaagctctgtaaactgcttcattgcgcctaaatagtttccaagtgtaatcgttccacttggctgaataccagaaaagataactgacataagtaattcctcctaaaattgaatgcgtgatggggggggagagaaggcaaacaaaaaagcccattcatcccaaaaactatagggacgaatggaccgcggtaccaccctaattatttcactactgtgaaatctctctaatccataataacgttaggatataacgccaaagcctactactttcggttcggtttggtgctcaaaagcccattccatactgtacaattacttgttcacaccaaccacaagctctctgaaattgcctcaatatgtactcttctttatcatcgcatacatataaatttatttattgttacttgagctcttttaatatgaaagaactaaagttttataacaaaatgttttgctgattattatatcatatgggatagtgtttgcaaactacatcaaaatagtaaagctaataagggtcgagaacaacccaaggaagatacctgtaatacaaattggatatgtccatttgaatgaatatgttttataaatacgttctttcttatctgtaggttcctcgacttcttcaattaaagagtcaatctttttgttcgtaccaaatactctttggaatgcgtaaatggttacattgaaaaaaccattttgaaatatgtataaaaaaccgccgataagaataaaaaacagtgcaatataaaacaaaatgttgacaaagttcaacaaaaattgagatgaaatgaggaatgcgccaatactagaagcaatcatcgctataaaaattagtatacaagtatgaaaaaaaactttattcaaaatattcccctccgtcaaaatattactagaattattatactataaaagctataataagtactaggattaattttttgaaaattatacgcaattaaaggtctgattttaagatgatggtagcaatgttaatgtatccctttacgaaaaatttaaaatataaatattttattaaaaattttaacaaaaaaacaaaaaactatattcacaattgttatattatatgtataatgaaaattgtagaaacttggagattattctttcaattctactttttaacaagtgagggtacaggaagtgcaattaggggaggcaacacaacatgaagaaaaagataccgttattacttgcatcaactttaactgcaagtatgttgcttagcgcgtgtagctaccaaaaagatgacgcaaaagcaaaagggaaagagaacgctacgagtagtagtaacggaaaacagattcttaatttaacagagttatctgaaattccgtcaatggatgcatcattagcatctgattcttcatcttctacagcattaaataatacgatggaaggtttatatcgtattggcaaagaccaaaagagaatgcctggagttgcagaagatgtcgaaaagctagatgatgggaagaaatacatatttaaattaagaagagatgcgaaatggtcgaatggggaacctgtaacagctaaagactttgtgtattcatggaaaagagcagtaaatccagatacaaaagcaacgtattcatacattatgttcgatattaaaaatgcagagaaaattcataaaaaagaattacctgctgaccaattaggtgtaaaagcgattgatgattatacattagaagtagaattagacaatcccgttccttactttatcgatttaacagtttatccagtattttacccactaaatgaaaactttgtaaaagcacaaggtgataaatttggtttagaggcaaatacaacattatataacggtccattcgttatgagtgattggaaacatgaacaaagtttccaattcaagaagaatccttcatattgggataataaaacggttaaaatcgaagaaatcaactttaatattgtaaaaaatacagcaactgatgtaaatttatatgagacaaacgcgattgatcgggcggctttaacgtctgaatttgttgataagtttagaaaaagcccagagttccaaacaagaaaagaggcaggggttgcttacttaagatttaatcaaagtaatcagtacttaagtaataaaaacttaagaaaagcaatttcaatgtcctttgaccgtgataacattgcaaaagttattttaaataacggcgcaattggagcttacggatttgttggaaaagatttcgctgaaggtccaaataaaaaagatttccgagctgaaaatggaaagctagttgaaacaaatccaaaagaagcaaaaaagctttgggaaacagcgaagaaagagcttggaactgataaaatcgaactagaattcttaaactttgataatgaagatgctaaaaaagttggggaattcttaaaaggtgagatggaaaagaacttaccaggtttatcaattaaaattaaacagcaaccattcgcacaaaaaaataaattagaagattctcagcaatatgatattgcgtttggtatttggggaccagatttcccagatccaatctcatatttagatatgtttgttacgaatggttctcaaaataaaacagggtattctaatcagaaatatgatgagttaatcctaaaagctaaaacagatacaaaagatttacaagctcgctgggacaaccttctagaagtagagaagatgttaattaaagaggatgcagttatcactccaatcttccaaaaaggttcagcgtatgtagtaaaaggtgccgtaaaagatattatcccaattaactatggtggtaaattaacttacaaatgggcatctgttgaacaaaaataatcttttttttccatcgtttacaagggtatatgcctatgatgggcatatgctcttattttaaaaaaataaaagtaagaatattttaaactatcttattgcttttgagaaaaacggggaggtgcttgactatgggacgttatgtattaaaacgtttcgtgtacatggctttgacattatttttaattactacaatgactttctttttgatgaaattacttccgggttctccgcttaaaaaccaggagaagctatcaccggcacaaaaagaaatcattcttgaaaaatacggattgaatgatccggtaccagttcaatatgcacgttacttaggtaacttagcaaaaggtgatttaggggtatcattccaatatgataaccgcccggtaacagacatgattgtggatcgtattggaccatcagcccaattaggtttacaagcgattatattaggaacatttatcggtttaattttaggtattgttgccgcacttcgtaataatacgtgggtagattatagtgcaacagttatttcggtactcggaatgtcggtaccatcattcgtattcgccgcattactgcaatatttcgtaggggtaaaactaggctggttcccagtagcattctggaaaggaccagagtttactgtaatgcctacaattgcattatcgatgggagttatcgcgacaatcgcacgtttctctcgtgcagaattaattgaagttatgcaagccgattacattttaacagcgaaagcgaaaggaattagccaaggcgttatcattgtcaaacatgcacttcgtaacgcgttaattccagttgtaacaattttaggaccaatggttgcggcattaattacaggaacacttgttatcgagcaaatttatgctgtaccaggacttggggaacaattcgttaaatcgattactttaaatgactatacagttattatgggaactacgattttctatagtgcgatcttcattttagttattttcattgtcgatattttatacggaattattgatcctcgtattcgtttagcgggagggaaaaaatgatgaaagatgtacaaaaattatctccagatttatttcaacaagccaatcaaaataatgttgataatgaagtcattgcccgtccaagcttaacgttttggcaagatgtaagaagacgtttattccaacataaaggtgcgatgcttggccttgtattgttagttatcattgcgctattagcgatttttggaccgatggtaagtaaacactcgtataaagagcaagatttaggtcgtgcgaaattaccaccaaaaattccagttattgaaaatgttcattggttaccatttgacggtacagatcaatatggtgttgaccaatatgaaaaacgtgatattaaagagtacttctggtttggtacagatgaccttggccgtgacttatggacaagaacatgggaaggtacacgcgtatcattatatatcgctcttttagcggcagcaattgacttagtaattggggttgcatacggaggtatttcagcattctacggcggtagagtagataacattatgcaacgtattatggagattattaacggtattccatacttaatcatcgttattttaatggtaatcattatgggatctggtatttggtcaattacacttgcgatggcgattacaggttggatagggatgtcgcgtattgttcgtggacaaatcttaaagttaaaaaaccaagaatatgtattagcatctcgtacattaggtgcaacaaatacacaattaattgtgaaacatttaattccaaacgtaatgggacctattatcgtaatgacgatgtttacaattccatcagcggtgtttggtgaagcgttcttaagtttcatcggtttaggaattcagccaccatttgcgtcactaggttctcttgtaaatgatggttataaatctattcaaacgtatccgcatatgatgttcatccctgcggttgtcatcagtatattaattttagcgtttaacttaatggcagacggattacgcgacgcgttagatccaaaaatgcgtaagtaaaagaggggagaggcaaagatgaaaacattgttagaggtaaaagatttacaagtctcctttgatacacatgcaggtgaagtacaagctgtacgcggcgttacttttgatttgaaaaaaggagaaacattggcgattgtaggagaatctggttcagggaaatcagttacttctaaagcgttaatgggattaattccgaatcctcctggacgcattaaaaatggtgaaatcgtatttgaaggtcgtgacttaacaaaattaacagaaaaagaaatgcagcaagtacgcggtaaagatattgcgatgattttccaagatccaatgacatcattaaacccaacgatgacaattggaaatcaaattatggaaggtctaattaaacaccaagggatgagtaaagcagatgcacgtaaagttgctttagagttaattgaccttgtaggtattccaaatccagaagctcgtttaaaacaatatcctcaccaattctcaggtggtatgagacagcgtgtagttattgcgatggcgttagcttgtaacccgaaattattaattgccgatgagccgacaacagcgctagacgttacgattcaggcgcaaattttagaacttatgaaagacattcagcaaaaaacagaagcagcaatcattttcattacgcatgacttaggtgtagtagcaaacgttgcggaccgagtggcagttatgtacgctggtaaagttgttgaaattggaactgtagatgaaattttctacaatccgaaacatccatatacttggggtttaatcgcatctatgccaagtttagatggttcagaagaagagttatatgcaatccctggaacacctccggatttattgaagccgccaaagggagatgcttttgcaccacgtaacccacaggcactgaaaattgattttgaaatggacccacctttatttaaagtaagtgatacgcactatgcggcaacttggttacttcacgagcaagctccagaagtaaaaccgccggcagtcgttgaaaaacgcattcttcaaatgaaagcaggtgaacaacatgactaaacaacgtgagaaattaattgaagtaaaaaatgtaaagcagcacttcgacgtgagtggtggtgttgtcaaagcggttaatgatatttcatttgatatttaccgcggagaaacatttggtcttgtaggagaatcaggttgtggtaaatcgacaactggaagaacgattattcgtttatatgatgcaactgctggtgaagtgttattcgatggtgaaaatgtacatggtaaaaaatcacgcgcagagctgaagaaattcaaccgtaaaatgcaaatgattttccaagatccatatgcatcattaaaccctcgtatgacagtaggggatattattgcagaaggtatcgatattcacggactagcgaaaagtaaaaaagagcgcatggaccgtgttcatgaactattaaacacagttggtttaaataaagagcacgcaaaccgtttcccacacgaattctcaggtggacaacgtcagcgtatcggtatcgctcgagcgcttgctgtagacccagaatttatcattgccgatgagccgatctcagcacttgacgtatcgattcaggcgcaagttgtaaacttactgaaaaagctacaaaaagaaaaaggtttaacatacttattcatcgcccatgatttatcaatggtaaaatacattagtgaccgtattggtgtaatgtaccgtggccaaatcgttgagttaacaacaagtgatgaattatatgcgaatccaattcatccatatacgaaatcactattatcagcgattccacttccagatccagattatgagcgcaatcgtaaacgtatcgtatatgatccatcacagcataattatggtagtgaagcaccaacaatgcgtgaaattcgcccaggacatttcgtactatgttcggaagcggagtacaagaaatataaagagatttatcaataagaaaaagagccattcttctgttatggaaggatggctcttttctactatataaaagaattgtatacatttgtcggtcagtcgatatatttaaagaatcgccgatataaatctcatgtatcattagtgatatccatatgcaaaattactgaacttgaacagaaacattctcctcttgttcttcaggtttaacaagtgcataacgctcccatgctctacttttccagcggaagaacataataatggcacgtgtccattcgtcgatggcgattgctagccaaataccaacgagccccatatctaaatgaaaggcgaaaaagtaacctagtggtaaactcattaacaccatagagaatgcaccgattaaaacaggatattttgcatcaccagctgcacgaagcgaattaatgatgacgatgttcatcgtacgtcccgtttcaagtagtacacttagtaaaagaacacttgcgcctaacccgataatgtgcggattatctgtaaacagtcccattaattgtgtacggaatgtaataacgagagcgaccatacataaagttacaccaattgcccattttacacttttccacaagcgttcgtatgcttcatctttttcgccaccaccaacgaggcggccaataataatggctgttcccataccaattgcaattgcaaataaataagtgaacatggaaatgttagtagcgtattgtctagcagctaatgattccgttcctaagtacgttgcgtaataaaggaagacgatttgacaagcttgatacatcacttgttcaaatgcagatggaatgccaatttttaaaattttcccaatgtattctttggataaagtgaagtaatattgtaatttcacacgatattccataacgcggtatagtaaccagaagaaaacaataagtgcgatcaatcgactgatagcggaagaaattgcagccccttgtacaccgagctcagggaaaccaaatttcccgaaaatgagtacgtagtttccaacgatatgaatcatattcattccgagtgaaataaacatcgcttgctttgtaaaaccgtgtacacggataattgcggctaatgagttaataatagcttgtaggaagatggctcctccgacgatagataagtagttttgcgcatacgttagtacatcgccttgtaagttcattgcgagcatcatatgtttcgaaaataaaagaaaaccagcgcttataacgagcccaactattaaatttaatgtgacggctaatgctgatattttagatgcttccataaagcgtttggaaccgaggtattgagatacaacgatagcagcgccgttcccgatgacttctaataccaaaatcgcaatatgaagatattgattcgctgcaccaaccccagatacagcatcgtctgataatgcacttaacatgaaagtatcagcgatccccattaacataaaaagaaaaacttctagaaaaataggccatgttaataagaataaacttaatttctcagtaggcccgttttttgcctgaattgctgccatgtccgtcccctctttaccgatatctatttttagcaaaatgtatcgtaacatactttcttaacctttgcactcattttagcctacatatttttattatgaagagagtgctattttatgataaaaacaaaaggataattatacataaaatattatgagatataaaattcgtttttctctgataatttagaaaagtgtaaaaaaatattatttttaacactttagtatgaataatcagcaatatgaaacgtttacaaaggtatattttttaacggaaaattttaatgaaatagaaatataaatatacaaaaaatatatttgtgtgtataatatgaattattagaacatatatatatttctttttgtttgaaaatgaaagggttaacatttttttggagggtggaagtatgaaaaaaaagataccagtttttgtagcatcaacagtagcgatgagcatgatgttaggggcatgtagctatcaaaaagatgaatcgcaagcaaacgctaaaggggatagcggaaaaagcggtgcgaagcaagttattaacttaattgaaacacaagaaattccaacgatggatccagcgttatcagctgatgcagtttcttcaagagtaatgactaatacgatggaaggcttatacagtttaggaaaagatgataagctagttcctggtgtagcgaaggaattcaaaaaatcagaagatggtaaaaaatatacatttaaattacgtgaagacgcaaaatggtcaaatggtgagcctgtgacggcaaaagatttcgtatatgcatggcaaagagcgattaacccagatacagctgcgaaatcagcgtacattatgtatgatataaaaaatgcagagaaaattaataaaaaagagatgagtccggatcaattaggggtaaaggcgattgatgattatatattagaagtggaattagataattcaattccataccttgtagatttaatggtatatccaatcttctatcctgtgaatgaaaagtttgtgaaagagcaaggtacgaagtttggtttggaagcgaatacaactctttataacgggccatttacattaagtgattggcaacatgaacgtagctttaaaatgacaaagagcgcgtcatattgggacaataaagaagtgaagattgaagaagtaaactttaatattgtaaaagatacatctacgccaattaacttatatgaaacaaatgcaattgatcgagcgtcgttattagcggagtttattgataaatataaaggaaaaccagatttccaaacagtagaagatacatctgtattcttccttcgtttaaatcaaaaagatccagctttagcaaataaaaatattcgtaaagcaatttcacttgcttttgaccgtaagccattcgtggatacattattaaataacggttctaagccagcgacaggattaattcctgataacttcattaaaggaccagataaaaaagatttccgtgctgtaaacggggatattgtaaaaccaaacgtgaaagaagcgaagaaatattgggaagctggtaaaaaagaacttggtaaaaatgaaatcgaattagaattattaaatgaagatgtagagttatcaaagaaaactggtgaatatttaaaaggtgaattagaaaagaatttaccaggtttaacagtaaaaattaaacaacaaccattcgcacaaaaactaaaattagaagatgcgggcgattatgtcatgtcattctctggatggagtgcggacttcccagatccaattacatatcttgatatgtttgtaacagatgggtcacaaaataagatgaagtactctaatccaaaatacgatgaaatcattatgaaggcgaaaaaagatggaagcgatgtaaatgctcgttggaagaacttattagaagcagaaaaaatgttacttgatgatgctgcgatcgttccagtatatcaacgtggtagagcatatttacaaagagattcaattaaaaatatgtataaccataaatatggcggcgatttaagctttaaatgggcgtcagtagagaaataagaaaaaaaagcaggtgatcacctgctttttttaatacgttcgtttcttataaatgccttttccgccaacttggttccagccagattgtacatccaaacttttgttaacaaacttcattttttcttttccaccaaagagcttttcgccgatgctatttgtaatgacaccaatcaatgctgttattccgatgatgagggcagcaaccgtaataaaatcaataaaaaaagcaatcatttgaaaactccccctttgcctgtctgtatgtttattgtatgagataaaaaatgaaaaagaaagaaatgtcagaaaaatatttaatttactttagaaatcatgtagacaggagggaggatatttgttaaaataagaacaaatgttcctttttattctcatttgtatagtcttacatttcttaattgatttatcaagaaaaagtaagaaaacgttctctttttcatagggaagattatagataaataactatatattatatgaaaaatctatgggaagtgagtagtaaaagggttgaaagttattgttaaagtacagctgaaatgagcgtaatcatgttacatagcagtgaaatacacgggagagttttctcaactagcaggaaatttactgtatatttcttgcaaaatctattgtataatgattatagaagttacttattaaaagtaattgttgtttattataagttgttgcttacatgaaatgtgatttttgtacttttcaataagacaagttatcacgaaaaattgctgaagttagaaattaaaactgtatttagtacagaatttgtactctttaaggagagtgagctttgtatggtaacattatatagttctccaagctgtacgtcttgtagaaaggcgaaattatggctagaggaaaatcatattccctatacagaacgtaatattttctcagatccattaacgattgaggaaattaaagagattttacgtatgacagaaagcggaacggatgagattatttctactcgttcgaaagttttccaagaattgaatgtaaacttagagtctttaccacttcaagatttatataagatgattcgtgactatccagggattttacgtcgtccaattatgattgacgagaaacgccttcaagttggttacaacgaagacgaaattcgtcgtttcttaccacgtacagtaagaacgttccaattacgtgaagcacaacgtcttgtaaattaattataataatatgaaaaccttctacctattatatagtagaaggttttttttaatgtttcacattgcgtaatcgaacttgttgtacaataaagccgatgcataaaatagtgaaaatgaacaaataaggaatgcttgcagtgaaacttggattgttatgaaaaaaggttgcaagtctgtcttcatgtgtaaccatttttcctgcagtataggcaagaattgctgcaccgcaataaatgaggaatggaaatcgctccataagtattaaaataagtttgctgccccaaataataatcgggatagaaatgagtaagccgattatgacgagtaaaaatctcccgtgagctgcacctgcaatggcaataacattatcaaaccccataacgagatccgcgaaaacaattgtccgcacagcttgaaataaagttgtttttccttgaatagaagaaagatcgttgctattatcggttaataaattgactgcaattaatgtaagtaaaaccccgccaatcaattgtagaaatggaatgtcgagtaaatagacagctagtatagtaaggacaattcttagtacaatcgctaaaagagtaccgatcaaaatagccttatttcgtttcgattcaggtaaatttcggctagctagtgcgatgacgattgcattgtcaccacctaatacaacatcgataccgacaatcattagtacggatgttaaaaactctaagtccattcgtctgcctccatttatgatgttttaataagcgaactatatgtatgtgatgaagaaagttgttgttaaataatctcttctaatagaagtttcactttattacagtgtacgggggaatgtggaaatgtatgtccaaattttttgtaagtaagaaatcgctataataatatatttacgtagttgatcgagtaaagataggcatataactatttttgtaaaataaatcgattttatttccattctggagaatcttatcataaaatgagagtacaagaatctattgatttgtcatatgagtggggaatcccttcataacaattctaagcaggaagggagagttgtattttggatattgaaagaattaatgatcatacgatgaaattttttattacgtacattgatatagaggatagaggatttaatcgtgaagagatttggtatgatcgcgaacgaagtgaagagctcttttgggagatgatggacgaagctcgtgatcatgacgatttctttattgatgggccgttatggattcaagtgcaagcagtcgataaagggattgaagtacttgtcacgaaagcagagctttcaaaggacgggcaaaagctggaactaccgataggggtagacaaaattatagatattcctctagatgaaggcatcgaatcattattccagcaagaattagtcgaagaggtagaagaacaaacaggaacaaactttaatgaagatggtacgtttggctttttaattaagtttaatgattttgaagatgtcatttcattaagtcatcgtcttatctttgaagatataaaagatgagctgtattcatttgagaaccgctattatgtatatgtggaattcgatgaagtgctacatgatgaagaagaaatcgatcgtattttaagtattattttagaatatggagaagaatcaactttaacaattcatcgtgtaagtgagtatggaaaacaaattgtgaaagagcatgcgcttgaaacgattcgcaataattttcctgctaaaacgtaggccgatttctgtagtatgaaatcggctttttatatgaagaataggaaagctttcttagttaggaggtaagagatgaaaaatacgttaaagctgattttctttatactgctattgttcgcattatttgtttcgttacgtatgtttattgatgtagcattttattcagatgtgattgggataaaagatgtttcggttttaggtattattagtattttatttacagtatctgcgtttttaattggttgcgttattttcttagagaaccgtcatccgtcaaaaacacttacatggctcattgtgttaggtatttttccggtatttggattcttcgcttatttattattcggacagaactttcggaggaagagaatgttccaaaagaaggcgttgctcgatgaacaagcgtttttacaatataaggggcatgaagattacgaagaacggattttacgcaatcataagcatcaagagctgttatttcgtttagcggatcgcttaggcgctttaaatatttcatttcaaactgaaacgagaacattaacaaatggagatgaaacgtttcaggccattttagatggattaaaacgagcgaaacatcacattcatatggaatattacattgtgcgtgatgataagcttggaacggaaattaaagatattttaatacaaaaatcaaaagagggcgtagtcgttcgttttttgtatgatgcggttggaagttttaaattatcaaaatcgtatattgaagaattaaacgatgcaggagtcgaaatgattccgttcttccctgtacgctttccgattttaaacgataaaattaattatcgaaatcatcgaaaaatcgttattattgatggaaaagaaggctttgtaggtggattaaatattggtgatgaatatttagggaaggataagtacttcggcttttggcgagacacacatttatatttgcgtggtgaagctgtacaaagtttgcagcttattttccttcaagattggttttatatgactggtgaggctgtgctagcccctgaatatttacaagcgaaagcagttgagggggagcattggggaggcgtgcagcttgttgcaggtgggcctgataataaatgggaaacgattaagcatttatattttgccatgattgcttctgctcggaaatccatttggattgcaacgccgtattttattccggatgatgatattttatccgcattaaaggttgctgcacttgctggtattgatgttcgtttattaatgccgagtaaaccggataagcgtactgtcttttacgcatcgagatcttacttcccagagcttttagatgcaggtgtaaagatatatgaatatgaaaaaggttttcttcatagtaaagttgtcatcgtcgattctgatttagcttcaattgggacagctaatatggatatgagaagttttcatttgaattttgaagtaaatgcctttttatatgatacagatagcattcgaaaacttgttcaagactttaaagatgatttagaagaatcaagtgaaattcatgttgatcattttcataaaagacgtcttcatagacgaattgttgaatcaacataccgcttattatcacctttattataaaaagagatgtccgaaattgggatatctcttttttaaaaggaatttgtaacaaattgtagaatataaggagctgaaagggtgtgattacgatatttatcgctaaaagagaaaacggagagaaaattcatttactctataattgtaatgaaaagcttttgcgccgtatgcgtcaacaagaacgattcttttgtgtagcttgtggaaaggaagtgcaaatgaaattagggaaacaaaaaagttggcattttgctcataaaaaagtggattcatgtcttgccttttatgaagcggaatcaacgtatcatatgcacggtaaagaattgttatatagatggttcaagcgtcaaaactttcaggtggatatagagtactaccttccagaaattaagcaacgaccagatgtttttgtagagagggcgggcagaaaaattgcaattgaataccaatgtgcaaacctcgctatagagcagctgtacaaaagaacatattcgtattggcaagctggtatacaggtcatttggatcgttggtggaaatcaattgaaaaagcaatctgcatattggatgaaattttcctcacttatggctttctccttacaatcttatcctcagccacttcttattttcttctgtccgaaacaaaaatcatttatgaaatgtgcatttgtcactcccttttctacaaatgtctttttctcacatactatatatttaccaactgatacgactacttttgaaatgcttttttctcccgttcctttcgggaaagaaagattgggtgaagagtggaagaagagaaagaactacttccgcaaaaatgccctgccgatttggaattataattataagtcattattacgcctcttatatcaatttaaatgtaccccagcaagctttccttctgaaattggtgttccactcccttctgcatttgctttacaaacaaacccatttatatggcaagcttttctatatatgaagtgtatagggaagcttgcagtgggagagtgtatttctcttcaatacgtgtgtagttatgtaaaaaggtatacgaaaaggcggatacttccgtacttttcaaagcatatatggaaagtggcagttactgaatatatgacatttttatgctatataggtgttttgcgtaaagtgggaacttatacgtaccggaaaataagggatgtcatgatgttaaaaacagaggaggagattataaaacatgatgagatttgcttaatacatgcgctatctttatttgaggcaaattttaacatgagaggaggaaaaggggatataataaagaatgattgtgaaggaattacataagaaaaaaacgaattgtacttaagtagagatatttaaaggagggcttaaagaatgtctgaacaaaacaaagcgaaagcattaccagatcgcaacgagattgaagaagcaagtacgtggcgattagaagatattttccaaacggatgcagaatgggaaaaagaatttcaagctattaaagagctattgccgaagttaactgaatttaaagggaaacttggtgactctgcggacaatttacttgaggcattgcaatatgaagatgaaatttcaatgcgattaggtaagttatatacatatgctcatatgcgttacgatcaagatacaacaaactctgtatatcaagcattaaatgatcgcgcaacaaatttatattcacaagtatctagtagcacagcgtatattgttcctgaaattttatcgatttcagaagatacactgcaaacattcttgaaggaaaatagagatttaagtgtatatgaacatgcattagaagaaattacacgtcaacgcccgcacgtattatcagaagctgaggaagctttattagcggaagcatctgaagtaatgagttcatcaagcaatacattcggtatgttgaataacgcggatttaaaattcccatctattaaaggggaagacggagaagaaatagaaattacacatggccgttacattcagtttttagaaagtgatgatcctcgtgttcgcaaagatgcatttaaagctgtatatgaaacgtacggaaaatttaaaaacacattcgcaagtacgttaagtggagcagtaaaacgtaataatttcaatgcgcgtgttcgtaaatatgattctgctcgccaagctgcattgagcaataataatattccggaagcagtatacgatcaactcgttgaaacagtaaatgacaacttacatttattacaccgttacatcgatattcgtaagcgtgcactaggacttgatgagcttcatatgtatgatttatatacaccacttgtaccagaagtgaaaatgaatgtgaaatacgaagaagcgcaagaccttttattaaaatctttaaacgtacttggtgatgaatatgttgatattttgaaagaggcatatgaaaatcgctgggtagatgtgtatgagaataaaggaaaacgaagcggggcatattcatctggtgcatatggaacaaatccgtatattttaatgaactggcatgataatgtaaataatttatttacacttgctcatgagtttggtcattcggtgcatagttactatacaagaaaaacacaaccgcacgtatatggtgattattccatcttcgtagcagaagtggcatctacttgtaatgaagcgcttctaaatgattatttattaaaaacgacagaagataagaaagagcgtctatatttattaaatcattatttagaagggttccgtggtactgtattccgtcaaacgatgtttgcagagtttgaacatattattcataagaaagtacaagaaggacatgctgttacgccagacatgctaacggaaatttactacgatttaaataagaaatatttcggtgacgctttagtaatcgatgaagagattggtttagaatggtctcgtattccacacttctactacaactattacgtatatcaatacgcaacaggatttagtgcagcgacagctctatctaaacagattttagaagaaggacaaccagcagtagaacgttatattaacgagttcttaaaagcaggaagctctgattatccaattgaagtgctgaaaaaagcaggagtagatatggcatctcctgaaccagtaaaagaggcactacaagtatttgaagagaaattaaatgaattagaagcattattatttgaagaaaagtaatgaaaaaagacgagggattgtatcctcgtcttttttgttgaatagatttaatgtcgatatttgttgaaaaaaagatgaatttctttattttttctaactgaaaggatagctttacggctgatttttgaacttaaaaccctttgaatcgttttttataattgaaataagagagtgtgataacgatgattccgaataaaagaggtaaggcaataattttaggaaaagcttgtagtagagagaggatgtacaagaaaaaagaaacgatgacagctagaaagagaagagcaatataagattttttcataaataaaccccctaaatgaccttttttatagcttattcaaaaatgaaaacgtttagaatgtgacaaaagtgtgaaattcgacaaaaggggttgtcatctgacgtcgaatcttgtaatataataagcgtgaacgaattcacatacaaacatatacccctttgtttgaacgtgaaaatttctcccatcccctttaatatttttataagccgtaaagaaaaagacctggtgtttacaccaggtctttttcttttgctatccatttccaataacgttcgcattttacttcaatcatttgtacttttcgtttcagttgtaatttttttagttcgcgctcaatttcttgctgcggacagtcataaataaatgctacttcttttgaagatataaattgtgttgcttctagtagcacttctaaaggtggtaatggttctggctcaatttcacattttacaagttctttcaataattgtacgtatacatcgtaggaataatttccagcgattttaataccttcttcatctgagttcgcatgaaaaaagacgagggaaggtatttctgtaatatgcatttcattcgtgaatttcaagtcacattggaaagctttttttgcactagcagaatgtagatcttttttaaattcttctacatcaatattgctatctctcgcacatgcaagtaatagttcgcaatcagggtttgatacattttcaaggaaaatgtattcttggagttttcgcaaaaacttcgaacctgcttttcggccttgcaactccgctgccttaattgccatcgaaactaaatatggtgttgacgatgcttcttgcatatgtacctttccatcacatgaaaaaccttgtaaactggttgtcttttcccacacaaatcgaatattagcaggtttattccatttgtgtgaggaagcgttcgttccatccactttccctgttacgatatgacgaatagagaagtatttcccgtattcaagccatagtttaataataaaaggctcaatttcccagcaatctttacaaagtggatcaataaataaatatgcttctacagacttatgctcgcatgcggaaggagatggcatatttatatgctttgcttcctgcttatccattacacttcacctgtttcgtttggagtattaaccatatgctgagcggttaatgctaaacgttcaaaaacaaactctcttatatgaccatgcactccagtatcatccattgcttgctccatacatgatagccaagcctctgctcgttttggggtaatctcaaacgggagatggcgtgctcttaacataggatgaccatgttcttcagtgtacaaattaggaccacctaaatattgggttaaaaattgcttctgcttcctagcggtttctgttaaatcttccgggaagatgggagataagtcagggtgtttactgacataggaataaaatgtatctactaatattgcaatgcattgttcaccgccaattgcttcaaatggtgtcatcggttgcttgctcatcctttataaactcctttttccatgaaatgtatatctattgtagcaatggaatgttcgagagggcaaataaacagccttctcaaagattctttgcttattctacgggtgtaaccttttttagtgagatgtatccactagtgaaacatattcactagtggaattttcactttagcgtgctttgttttgtttggcaaggaaaaagcgttttactttgttatttgtatggcgaacgggtatgttatgttgcgttaataaatcaataaatgcagcttttcctgtttcttcatcttgcacttcaaattcaatttcataatcatcgtgattgtaatagaaactatgatcaaagacaagcgttccgcctttaaataatgtttctgctctttctgttgttaaactacccatatatgttaaagcagaaacaggaatttgtaatttgtgtaattgatctactactgctccttgaatgattgtgtttgtttccatcatcatttttgcttcgtcttctgttacgacttgatgcgtttctaataaaccaatttctgcaggttgtttcaacgttaacgtataagtttttcctttatgacgaatacgaagtgcagagccagcttcttttaacgagaagtcaggtgtttcaaagtagtgattcacttgttttgtaaatgcttcaatagaaaacgatttacataatgtatcgaattcttcttttgtaacgatatttttgaattcaatttcaatttcttgtgtcattgtataatctccttttgaaaaataattctttacacattatcgctttttcataaatttggttcaatgttttatttgtttgcgtccatgttatgatacaataatactgttaagtaagacaggaagttgagatggaggagttagagcatgcaaaataaaatccaagttaagagcgtagaaaagagagagaatgctcttattttttgtgcggaaaatagtgaaatagaggtaaaggagttaagtgcgcgtaatcacgtacttgtagactcagacaatttatcatttttatatatcttagaaaatgaatcatctttcatttatgtaagtattccgcacacatgctgggaagcaatgcatgaagcgatgaatagcgatgtggttatgttcgttcgcgtgaatgacattgaaatggaattagaaggattaaaagaagaagtagaatatttagttgaaaatattgaaggtaatgcaaattacggagaagaactagtaactgctgtagaaaaagtatttctataagcaaatggattgattttggtggtggttgaaatgaatcgaaattgggaagaatttttagcaccttaccaccaagcggtggcagagctgaaagtgaaactaaaaggaatgcgtactcaatttgcaatgttaacagagcattctccaattgagtttgtaacaggaagggtaaagtcggttgcaagtattattgataaagcggagaagagaaatgtaccgctagaccgattgagagaagatatgcaggatattgctgggcttagaatgatgtgtcaatttgttgatgagattaagcctgttgtagaatatcttcgaaaacgaaatgactttgaaatcgtggaagaacgtgattatgttacgcaaaagaaagatagtggttatcgttcttatcatgttgtcattagttatcctgttcaaacgattcagggtgaacaaaaagtattggtagaaatccaaatacgcacgctagcaatgaacttttgggcaacaattgagcattctttaaattataaatatagtggacgttttcctgaagatattaaaataaggttgcaacgtgcagctgaagcggcgtttttattagatgaagaaatgtcttctattcgtcttgaaattcaagaagcgcaaaaggctttttcaagaaagcaagaaacgaaagattctgaatcataaactaaagggtgttgggcgatgaaatttacaattatgtcaaagggagatcaatcatcagatacactggcaagcacgatgaaagagtacttgctagattttggatttataatggatgaaaaggaacccgatattgtaatttctgttgggggagatggaacgcttttatatgcgtttcatcgttattataatcgattggatgaaacagcatttgttggtgtacatacaggacatctaggtttctatgcagattggttaccgacagaagtagagaaattagtaattgcaattgcgaaaacaccattccaagtggtggaatatccgcttttagaagttattattcgctatgtgaatggaagtaaagagtcacagtatttagcgatgaatgaggcgactgtaaaaagtgcagaaggtacattagtaacagaagtagaaatacgcggagaatattttgaaacattccgcggagacggcctatgtatctctactccttcaggaagtaccgcgtataataaagcgcttggcggagcgattattcacccatctattgaagcgatacaaattgcagaaatggcgtccattaacaatcgtgtatttcgtactgtaggatcgccgctcgtattgccgaagcatcatacatgtgtgttaaagccagctgcaggaatgaacttacaaattacagtggatcatttaacgatggttcatcaagatgtgaaatcaatccagtatcgggtcgcaaacgagaaagtacgatttgttcgtttccgtccattcccgttctggaaacgagttcgtgactcgtttgttgcggataaatagaaagggttatatatttgaacagatttacattgaaatgggatataggtccggctgaagagggaactttagttagggaatttttgaaaacgaaatgtatttctaaagccgctttaacggatataaagtttcacggcggggcaattgaagtaaatggtcaacatgcgagtgttcgtcatcagttgcgtgctggtgaagaattacgtgtcttttttccagttgaggaaagaagtgaagggatgatggcagaagatatccctttaagcattgtatatgaagatgacgcggttcttatcattaataaagaggcgaacatgtcaacgattccgtctagagaacatccgacaaggagtgttgccaatgcgcttttatctcattatgataagcagcaccttgcaagtacagtgcacatcgtaacacgtttagatcgtgatacttcggggcttatgcttattgcaaaaaatcgtttcgtgcatcatcttttatcgaagcagcatcaacaaaaagctgtgaaacgaacgtatgaagcaattgttcacggaaagattgtagaacgagaaggaatgattgatgcaccaattggtcgaaaatctgatagcattattgagcgaacggtttgtgaggatggacaaagggcagttactcattttaaggtaattgatagtacatatcataagacacatgtagcgcttgagcttgagacaggaagaacgcatcaaattcgtgtgcatatggctcatataggacatccgttacttggtgatagcttatatggagggagaagggatgaaatgaaacggcaagcacttcatagtaaatctttgacgttttatcatcctattttagagaaagagatgtctttcactataaagcttccaagcgatatgcaagaagtgttgcggcatacttaaaaaggggacaaaattcttatattataaagaattttgttcccttttttcttagcggaataatattaaaatttggttttcacccgtacgctttataacgaaaaatccactttcggcttttgtagcaatgccattgtcatttggacgacaatatccatgtgcttcgcaagtgccgtcatcacgtactaacatttgtccaattaatccgacaggaagccactcggcgcgatcttttcttgctacatatttgcaagttggatcccattctgtatttaaaagaggttgtatttcttcggcttccgtccatacatattggcgttttccaaagttatctgttttataacgtttttgccaacttaaagccccgctatttcctataagggcaggggttgcactagatattcctaaaatgaacgaatcgcgtgaagtagctatccgaattttttcttcgttactaaatgtaacgaaataaccgacatcaataggtttataaccttcggtttcaaacatttgtgcaaaatccgttccgcttgcattgtaagacgcgccctcaatgtacatttctccattatgagcaagccatttagccccgatattatggtcggtgtcgcttacaccatttgcaataaaccaagaataagcttcttctgcaatgccgaagcgccccataatatggctacctgcaaaatgagctgttgatgtatgatgaccttccgcatgagaagaggatccgttagcgatagttgcgtttccttctgcgtgtgctgcttcgcctaaagcaattgtctgtttaccctccgcatgagaataagccccgcctgctgtcgtttcacttccctcactatgcgaactatgtccagttgcttttgagtttgatccttctgcatgagagaaagaaccttttgcgtgtgttaataagccttccgcatgtgctgccatgccctccgcatgagagtgaagcccctctgcatatgcatatcggccgccccttttaacttttgtattttcaggtgtaggtgtctcaattatgaggggtttttcagtttgtatatcattcgatgaagccaatgcctcttttattttttttactttgtttataatagcagctggaatttctggttccacttttttatttattgctacagaaatattttcttccgtcttttcttctgcttgattagaatgtattacctgttcatcttgatttgagagctgtttatttttttgttgcatctttatttttctgcgatcgattatgcggctcatcacagcattttctaaagagacatatgttggttttactttgcttttttttgatgactcttgttcttccagttcttctatcgctgcagcccgaatactacaccagttgttaattccgtacatgggcagatataaagggggaaattttcttttttgtttagaagattttttcttcattctgtcacctcctgcgacattatatgtagtgtaattaaaaaaagatgcactttattgcatctttttttaattactttacctagttttatatgagatctgcctaaataatgctaagtaaggtagttatgaaattggacggaatttctcagcgacaaaaggtaaagaagaagggacagagatagtctccatttcaggataacgtaatccggttaatttgccaccaaatacagcaccagtatcaatattgactgtctgattgacgaatcgaggttctgttactggtgtatgtccatatacaatccaagcttgccccttgtattcttgcgcccaatcgcgacggacaggtgagccatcggcatgcttttctcctgtaatatcgccatataatacaaaggtttgtacttttttatctcgtcttcctatgtaatcttgccgaatcccagcgtgacatacgattactcttttttcatctagtatgtggtagagcggtgattgttcataaagagtgataaacttttcttttataatgttttgcttattaggaggaagtgcctcatattcagcaacagttgtttcaagtccgtgagcgactgttacattacgcccaaggaaaaatcgatatagtttattacagtgatttccaggagcgtaataagcttcttttttatgtatgacaagttcccatacaatttcaatcatacgtaatgaatgaggaccacggtctgtaatatcgccaacgaatgcaagtttacgttggtcagggtgaaccggtagaccgctactccagttatatcctagcttctctgttaaattttgaaactcttggaagcatccatgaatatctcctataatgtcatatttcatatttaaacctccatcgtatttttcattagtatatctaaaaaaggatagagataaaaatatagcgtttttgtgttgttcatttaaacataaagattttcgttcttgagcgaacatttaaaatgaatccaatcgcaatcatgtatgtaagcagtgaacttcctccgtagctcataagaggtaatgttatccctgtaatgggaagtaatccgattgtcatcccgatattttggaatacttggaaagtaaacattccgattgtaccagcgcaaatgtaactaccgaaaggatcattactttctaaagcaatatgaatcattcgaaaaatgagtaagaaaaaaagagaaataatgacacttgcgcctagaaatccaaattgttcagcgacattagtgaaaataaaatctgtatgtggttctggaaaatatacttgtccattttcccacccttttccttgcatttctccggatccagtcgctaagaatgcttgtcttaattgatagccttgtgcatcatatttgtaaggtgctaaccatccgtagaagcgatttaattgatattcttttaaaatgtgtgctttaaagaaatctgtgtgagtaaaaaaaatatatattaatgtagttccagcaacgaaagtagctgaaactaatccgaaaataaaacgccatcgtatgccagaaactagtatcattgctgcaagcatcgctgaaatgaccattgtatttcctaaatctggttcctttgcgatgagtagtagtggtggcaaacttgttgcaaatatttttccaagtagtaaaaaatcgtcatgtattgtttgggaaaaatatttctcattatggtttgctataattcgtccaatgacgataattaaaaataatttcataatttcagaaggctgaaaatttccgatgcctgggagcctgtaccaagcggtagcgcctttaattgtaacggcacctggtacttgaagttctagtccaataagtagtaccattgcaaagctgtacaaataccaagcaattttttgataacgatcgaagtcgataatcataataacaccaatggctataaatccaatgaaataccattggatttgctttagtacaaaattgacgttttgtaaaaatggcggtaaagaggcttgcgcacttgcaatagcacaacaactaacaatcccaatggcaaataaaataaatagtaatacgtagtctatttgatattgagaatttggatctttcaatgtaggtattcctttctactgctctttatagtaatggattttatcccgcattaatgggcagtaagacccctacctcaaaattcagcgaaagcgaagaagttaggtgggggatcaactgcccgtaaaagcccgattggtgagagctgattaaagtttcactttatagtatgagaaagaatgtatgaactatacgaatgattcacatatagtccatacacttttaattttgcagagtagtttaattgtttaactctttaataattatatccaaacaatgggaaagacgtacatgtgcgtcaggaaaaatatctagttgatgaagatagtattttaaggaacttttacaccattggtaagcactaagtagagctgctctatagtctgtagtattttgtaaaaagccatattcttttgctgttataacgaggtgtgtgaaatcttcacaaccttgaaggagcttattgtgtatttgttgtccagcatggtagcgaaattgacttaaaggctcagaaatgtatattgcatttcctttagaaagtaaagaaatccatgaggccatatcaacactacaagaatattgtcgctctttaagagtgccaaaaggttcagtgagcaattcctttcggaacaaggtagttgtaggctcaccgataatgttgtgtccaccttttaacatccaattacctaaaaatatcccgtttaatggggtgtcttcactatataacctttgtgttggatgggaatcacctattagatttccatgatcatcaatgcgtactcgataagaagtaacaagagcaagatttttattgggatcttgctcaaaataggtcatcattttttgtattttatgcttataaaacacgtcatcgtccattaaaaaatttatatactcaccatttgatttttctatgagcataaggtcattgtgaaattgtcctagagtaggaatatttcgaatgtatgttatatttttataatttggtaagtattgttcgcgtattaaagttgctgtttcatcatttgtactatcatctccgatgatgatttcaatattagaataagtttgtgccaatgcactttctagagcaattttgaaataatgaggccgattataagtgggaataaggatggaaacgagaggtggatttttttcattcatcatacataacttcctttcagaagcttttttttgtaagaacaatatcttggtaacttgtatattcatgtctgccgcaccataaaccgtaatgcggcttattgattatttctaggccgtacttattcaatagattgcaaatatctgtctcaggataagcaactgcgaaattcggaatatctttatttacaacgtagcaattttcgattcgatgataaaaacctaatgtactttgtcctgcatttaaataataggacgattcaggatttataagaaagaatgtaatgaaacatctcccgtctttttttaatacacgtacaatttcagatacgtaatgttctaattcttttgggagaagatgcgtaaatacagaagttaaaaagataaaatcgaatgtcccgtcttcataggggaaacgatattgagaggcatcttcttttccttctggattatagaattgattgtatatgtcaacatgttcaaagtgaaaattattacgcatagttgaaatgttattttggcaccaagtaattccatctttaaacaaatcaaatccataatacgctccatcatcatttaagtaattcaataatggtacagccattcgaccgacgccgcagcctacatctaatactttttcatttggttttaaagcgccaatttgaataaaatgctttaggaactcttttccaacttttttgaagtcgccacctacatattggacgagttcaggaggggggagtaaagtcatttctttgttaagttcactcatgagtatacccctttcttgtatgagaagatgcagtaaatctattaataaaattttcaatttgtattgagagaacacaggaaaacaattgttatatgtaaggagattccgaaaaagaatacttaattggattagaagtgagagaaggatgagtgaaaatgaaatctcctatagattaaatcttttttattcttttctccaataaacgccaaatacatcaattttagtaataggggcttttaaatttcgttggtttctaaagtctgtcacagcctcagcgcatggcggtagcccgtagtcatcgataattatatagccacctttagaaactttatcatataagttcacgagaccatccattgtggattcgtacatatcaccatcaagccgtgcaattgctattttttcaattggtgctgttggtaaagtatctttaaaccagccttttaaaaatttcacttgatcatttagtaaatcatattttttgaaattctcttgtacttgttctaaagagacgcgtaaataatcgaatgtgtgcaaataatcaccgtaatcttttggatattgttctagattcggtgctggcaaaccttcaaatgaatcagcgacccacacattacgattcgtaatgttgtttgcttgtaaaaaaccattcataaaaatgcacgatcctccgcgccatacacctgtttcaataaaatctccctctatattttcacgaacaacggtttccattgcctcttgtaattggttcatacgttctcgaccgatcatgctatgtgctgctcttggccaatccattccatcatggcgttcactttttgaaacatttggttttacaatttttaagttatggttttcagcatattgcttaatgaataaagggagggggactgtaactggctcgaattctagttcttttgaaatatgtagagatgcgggtaagtatgcctcatattctaaccatatttcaaataaaatggtcttctttagcaattcgagataaagctgaacagcagatttactttccatatttgtgcctcctgcaaaatgtcatacaacaatatgattatgtagatagcgaatgtttcatgattgaatttgaaattgaaaaagcagtaaaactgatatcagttttactgctaagtaaaaatttaagcgattttttcaataataatagatgcatttgtaccaacagctaatgatagcccaagccctgtaacgattacttcaattaatgatggagttgtcgtaatttgcgtaattgcttgaacaacgataggtgctccaactgagattaaagtggccccagtacctggaacagataccccatttacttggattgtaagtcctcctaatagacttactgctgcagtgtatacgataacggtaattttatagaatccagtttgactaattacgaaagtatcaggatctaattgagaaattgctgtaccaaactgagatccaacagtattaaatggtactggagcattaagtccaatatccaaagaaatcccagcggagttaaatgcatacaatcctgctggaagccctagtccagatggtccagtcggtccagtcggtccagtagccccagtagccccagtcggccccgtaggtccagtagccccagtgtcaccagtcggccctgtaggtccagtagccccagtgtcaccagtcggccccgtaggtccagtagtcccagtgccaccagtaggccccgtaggtccagtagtcccagtgccaccagtaggccccgtaggtccagtagtcccagtgccaccagtaggccccgtaggtccagtagtcccagtgccaccagtaggccccgtaggtccagtagtcccagtgccaccagtaggccccgtaggtccagtagtcccagtgccaccagtcggtcctgtaggtcctgtaggtcccgtaggtccagttggcccagtcggtccagttggcccggtaggtacagtcggccccgtaggtccagtcggtccagtcggcccggtcggcccagtcggaagggtaaacggtggtatcggtggtaatgtaggtcctacaagattagggtcaaatgcactagctgataaagattcatcgggatttaatccatttgaataattattatttgacataaattcacctccataaagcgttcattatatagtagatgcaaaaccgaaagaaaatgacacggacatttgaattattgaaaagaaatcttaaactacttgaacaatttaaaaaaatggaaagtttagtatatgtataacatatgattgatttggaagagggtgattatgttgaacaagcaaggaattacaattagtttatgtatgattgttcgagatgaggaggagacaatagcccgttgtttagaaacagttgaaaaaattgtggatgaaattatagtagttgatacaggttccgtcgatcgaacgaaagaaatcgtagagaaatacacttctaacatatatgatttccagtggattgatgattttgcagcagcaagaaatttttctttttcaaaagcgacgcaagagtatatattgtggctagatgcagatgatgtcttattagaagatgctcaagaagcattgaaacttttaaaaagagaattagatcctaaaattgatgctgtttcgatgccttatcatcttgcaatggattctaacgggaaacctttatattgtacaaaaagaaatcgacttgtaaagcgtgaaaaacaatttcaatggtttggaaaggttcatgagtatttagctatttctggtgaggtttttagtagtaatgttgctattacacataaaaaagaaaaaaaagtaacaaatcgtaatttgaaaatttttcaaaatactgtagcggcaggtgaagaattaagtccgagagatttattttattacgcaaatgaatctacggataaccaaaaatatgatgatgcagttcttctatatgaaacatttcttaatcaagacgaaggatggtatgaagagaaaatttatgcatgtggtaagttaggagattgctatgcaaagctaggaatgtgggagaaggcaatcgaatcttgtgtgaagtcgtttcggtatgacgtccctagaggagagaattgtacaagaataggatatatatatatggaacaagaaaaatataatgaagcgatattttggtttaaacttgccacggaagtaccaatggcaacggaaagtcctttccatagtccagctagctacacatggctaccctatttacaaatgtgtatttgttatagcaggttaggggagcaggataaagcgtattattacaatgaattagcagcttcttatgttccgaataatgctgcaattgaatataaccgtaaatattttcggggagtttttgataaaccatataaagtgtaataggtttcgttttttagaaatgatttatcgctattctaactctaatagattggttatatattagagtatcagtaacgtaaccaatataaataaaagattttatactgctatttgcgggctaataatcattgggggatgaacaaaatctgcactttatagaattcatatgagatttatatttctaattcaatttgcataaggagtgtgtgaaatgaatcgcgaaaaaagttctttatatgaagaaaaatccgagcattattataatgcagcgaatccgaatttattaaagcatataaaaaaggaatggaaagaagttcttgatattggttgctcgagcggtgcattgggagcagctattaaagaaaacggtacacgtgtatcaggaatagaggcatttccagaggcggcagaaaaagcgaaggaaagactagatcatgttattttaggggatatagaaaaaatagatcttccttatgaggaggggcaatttgattgcgtcctatttggggatgtattagagcatttatttgatccgtgggctgtgattgaaaaggttaagccatatataaagcaaaatggtgtgattttagcaagtataccaaacgttgctcatatttcagtattagctcccttacttgctggaaattggacgtatacagaatatggtttattagataaaacacatattcgtttctttacattcaatgaaatgctaagaatgtttttaaaagcaggatattcaattagtaaagtagatcgtgtatatgttgatcataaaatgtatgagccgcttattgaggagttatatggaatttgtaaaaaatatcgtcttggaagtggcttcatggctgagacagttgtatttcagtatattattgaagctgaaaaatcacaattatgagtgctgcagacaaaacaatattatttgttacatgcataaatgatcggaaattgtatgcaaactgcgtgcgacatatattgcaattgttagtaccgccagggtatattgtccaatttatgccgattcgaaatgcgaaaagtatgacgagtggatacaatcaagccatttcgcatccagcgaagtataaagtgtatttacatcaagatgtttttattataaatagggcttttttatacggattacttcaattatttgaggaacatgaaaaccttgggatgattgggatggttggagcgcaatatgttcctccgactggcgtatggaacgaagggcgtggaattgtaggaaaagtcattggttatatgaatgatttgttttatatggcaagtttagaacaaccgtatcatgaatcaaaaacatttattcctgtagaatgtattgatggtttattaatggcgacacaatatgatgttccgtggcgagaagacttatttgacggatttgatttttatgatgtatctcaatcatttgaatttaaaaaagcaggatatacagtcggtgtacctgtacagcgcgatgcttggtgtatccattatcattttgatgtgaatatgacgaactatgaaaagtatcggaaaatatttgtggaacactatatgtcagatgtaaataaggaagaataaaaggggggacaaaaatgaaagatcatacaatattagtcgttgtttgtgtaaataatgaggagcttttcaaacaatgtgagagccaaataagaaacatttttgttccctctggttatgtcgtgcaaatttttccgatacgagatgcgcaaagtatggcaagtgcatacaaccgagccctttcatatccagcgaaatacaaagtgtatatacatcaagatacatatcttattaatcgagacgtgttttctacacttatatctctttttaaagaaaatgaaaagcttggtttaataggagtcgctggggctcagtttttaccgaataacgggatatggtgggaaggaaaaaatttagtagggaaagtgattgagtatagaagacggaattatcaattattaaatttagatcaggttttttatggtaatcaaccatttttgtcagttcaggcaattgatggtttattcatggcaacgcagtatgatattccgtggcgagaagatttgtttcaagggtttcacttttatgatgtgtcacagtctttagagtttcaaagggctggttatttaattggtatcccaaatcaagcaaatttatggtgtattcattacaacggggatgagtttgatgcggatacatatgagaagtaccggaaagtgtttgtagaacattacaaagatatattatctccatcataaaggagagatgaaaagtgaaaggaattattttagcaggtggtactggatcgagattatatccaataacgaaagtaacgaataaacatttacttcctgttggtcggtatccgatgatttatcatgcggtatataagctaaaacaatgcgatattacagatattatgattattacgggtaaagagcatatgggggatgttgttagctttttagggagtggtcatgaatttggagtgtcctttacgtatcgtgtgcaagataaagcgggcgggatcgcacaggcgttagggctttgtgaagatttcgtcgggaatgatcgtatggtagttatattaggggataatattttttcagatgatattcttccgtatgttgaagagtttgcaaatcaaaaagaaggtgcgaaagtgctattgcaatctgtagaagatcccgaaagatttggcgtagcacatattcaaaaccgaaaaatagttgaaattgaagaaaagccgaaagagccgaaaagttcttatgcggttacgggaatttatttgtatgattcgaaagtcttttcttatattaaagaattaaaaccttctgcacggggagaacttgaaattacagatataaataattggtatttaaaacgaggggtacttacttataatgaaatgagcggctggtggactgatgcgggaactcatgcttcgcttcaaaaggcgaatacgttagcgcgtgatattaattttgggaaacagtttaacggagaataggtgagaatatgaaagttgtagaaacaaattttaccgatgcaaaattgttagaaccgaggttgtttggagacgagcgtggctttttttcagagagttataataagcaggtgctagaaacattagggataacgtattcatttgtacaggataacgtatcttattcggctaaggcaggaacgattcggggactacactttcaaaaaaaaccgaaagcacaaacgaaactcattcaagttatgcaaggggcaatttatgatgttatcgttgatttacgaaaaaaatcaccaacatttaaacaatggaaaggatatattttaagtgcagataaccatcggcaattactagtgccaaaagggtttgcgcatggattttgcacgcttgttccgcatactatcgttatgtataaagtagatgaatattatagcgcagagcatgactcaggattactttgggaagataaagatttagcaattccttggccagtaaccgatcctatattgtccgataaggatcagatattaccattattagaggaatatgaagatagtttttaagtaggagcgttgtttatgaatatattagtaacaggtggggctggatttattggaagtaatttcgttcattacatgctacaaagttatgaaacatataaaattattaattacgatgccttaacatatagcgggaatttaaataacgtaaaatctcttctggatcacccgaattactcttttgtaaagggagaaattcaaaatggagagctattagaacacgttataaaagagcgggatgtacaagtgattgtaaattttgcagctgaatcacatgtggaccgtagtattgaaaatccgattcctttttatgatacaaatgtaattggaacggtcactttattagaactagttaaaaaatattcgcatataaaacttgtgcaagtgtcaacggatgaagtgtatggctctttaggaaaaacagggaagtttacagagaaaacaccgttagctccaaatagtccatattcttcaagtaaggcgagtgcggacatgatagctctatcttactataaaacatatcaattaccagttatagtaacgcgttgttccaataactacgggccgtatcaatatcctgaaaaattaattccgttaatggttacgaatgcactggaaggaaaaaaattaccgttatatggcgatggattaaatgtaagagattggttacatgtaacggatcattgcagtgcgattgacgttgttctgcataaggggcgtgtaggagaagtatataatataggtggaaataatgaaaaaacaaatgtagaagttgtggaacaaattattaatcttttaggaaaaacaaaaaaagacattgaatatgttacagatcgtttagggcacgatcgtcgttatgcgattgatgcagagaaaatgaagaatgaatttgattgggaaccgaaatatacgtttgaacaaggattacaagagacggtgaaatggtatgaaaagaataaggaatggtggaaaccactaaaagaccagtaaggggcatgttaaatgaaagagagggttatcataacaggagcaaacggtcaattaggaaagcaactatttgaagagttagactctgaagaatatgatatatatccatttgataaaaagttattagatgtgacaaatatatcccgaatacaacaagtggtacaagaaataaaaccacatataattattcattgtgctgcttatacgaaagtagatcatgcggagaaagaacaggaccttgcatatagaataaatgcaatcggagctcgaaatgtagcggttgcttcacaattagtaggagcgaagctagtttatattagtactgattatgtatttcaaggcgccagaccagatggatacgacgaatttcatagtccagcgccgataaatatatatggggcctctaagtatgcgggggagcagtttgtcaaagagttacataataaatattttatcgttcgcacatcgtggctatatggtaaatatggaaataattttgtcaaaacgatgatgcgattaggaaaagaaagaaatgaaatatctgttgtagcggatcaagttggctctcctacgtatgtggcggatttaaatatggttattaataagctcattcatacttctttatacggtacataccacgtatcaaacagaggctcatgctcttggtttgaatttgcacaaaagatattttcgtacgccaatatgaaagtgaatgtattacctgtttcaacggaagaattcggggctgcggctgcgaggcccaaatattctatttttcaacataacatgctacgattaaatggtttttcacaaatgccgtcttgggaagaaggattagagcggttttttatagaaaccaaaagtcattaacaaatttctgttaatgacttttttgtttgcctttaagcggttttatggtactataattatagtatcaggtactaataacaagtataagtatttctgggaggatatatcatggaactattacaagggaaaacatttgttgttatgggcgttgcgaaccaaagaagtattgcatggggaatagctcgctctttgcataatgcaggtgcaaaattaatattcacatatgcaggagaacgtttagaaagaaacgttcgtgaattagcggacacattagaaggacaagaatcacttgtattaccttgtgatgtaacgaatgatgaggaacttacagcttgctttgaaacaattaaacaagaagtaggtactattcacggtgtagcacattgtattgcttttgcaaatcgcgatgacttaaaaggtgaatttgtagatacttctcgcgatggatttttacttgcacaaaatattagcgcattctctttaacagctgtagcaagagaagcgaagaaagtaatgacagaaggcggaaatattttaacattaacataccttggcggcgagcgcgttgtgaaaaattataacgttatgggtgttgcgaaagcttcattagaagcgagcgtgaaatatttagcgaacgatttaggtcaacacggtattcgtgttaacgctatttctgcaggaccaattcgtacgttatctgcaaaaggtgtaggcgatttcaactcaatcttaagagaaattgaggagcgcgcaccacttcgtcgtacaacaacgcaagaagaagttggcgatacagcagtattcctattcagtgatttagcacgcggtgtaacaggagaaaacattcatgttgattcagggtatcatatcctaggataaatataatattaatttttaaaggacaatctctaaatgctgagattgtcctttttatttgttcttagaaagaacgatttttaacgaaagttcttaccacgtgatgaatataactataatagtacacgatttatttagctacgtatggaagtgggagggacgagtgtgaagaataaaaataaaagttcaacagttggaaaaccgttgttatatatcacgcaagtaagtttagaacttgctgcaccgaaaataaaaaggattatcctgacaaactttgaaaatgaagatcaaaaagagaaaagtaatagacaagaaaatattgtaagaagtgctgtggaagaggtaatagaacaagaacaacaagaagagcagcaagtggaagaaaaaatagaagaagaaaaagaagaacacatagaacaagaagagcaagaaccagaaccagtaagaactgtcccgtataataaatcatttaaggatatgaataatgatgaaaaaattcattttttactaaaccgccctcattacattccgaaagtaagatgcagaataaaaacagctacagtctcatatgttggatcgatcatatcgtatcgtcatggcattgtatctattatgccgcaaaatagtatgagagatattaggttgtctatagatgatatccaatcgattagtatggccggtttttaaatatgtaaaggtggtagaaagcttctaccaccccaatagttttttagtttactttacgatagaaacgtcgcgtaagcattgaatcgcacagaaacagcttaaatcaacagtaatgcaagtagttgtagatattaatcttgcatttggtacagctaaaaacgtacaaattggatcgtcaccaggtggtaccggagtaccgtcacctaatactacagttaatacacgtagcacagcacagctatcatcatctacactttccacacggaaaattggagatcggcagctagtaaggcttgaagatggtgcaaatgcttcaaaaggttctccagtttttgtgtataaaataaaagggcgtgtatttgctactgatgcagtattgtgtgcacctaaaaatgggatttcacaaccagatccacatgttgttgtagaacaatcttgtaattcattgatgaattttacaacgtcaactacacaatgagaagagccatggtgtttattttcgttacaactcattaatgtcactccttatcttcttgtttgtatttacattaataagatattggagtcgaggagatttggtcacaatctcaagacctttttttttaaataggcgaaagaggataagggtaggtggaattatgctgtttacaagctggcttttattttttatttttgcgttagctgcttttaggctcactcgtttaattgtttatgataaaattacagcctttttgcgaagaccatttattgatgaattagagattacggagccggatggaagtgtatcaacgtttacaaaagtgaaaggtaatggattaagaaagtggattggcgaattattaagctgttattggtgtacaggtgtatgggttagtgcttttttattagtcttatataattggatccctatcgttgcggaaccgttacttgcattattagctattgcaggagcggcagcaatcattgaaacaattacaggatattttatgggagaataatatattttcataatacgagaaaaagcggagtttaaaagaatgagggaacggaaataaagagttgttcatatagtaaatagacagaattgacagtagaggagatgtttgctgtgagcaataatctaaggcagaattcatatgacctgcagcagtggtatcatatacagcaacaacaccaagcacaacaacaggcatatcaagaacaattacaacaacaaggatttgtgaagaaaaagggatgcaattgtgggaaaaagaagaacacaataaaacaatatgaagaatgaaacactcatgctactgtgagtgttttttattatatataaaaagcggtatttctgtataagaaataccgctttttactagctaatttgtgcaactgttaatgctgcagcacgaatgtctacagttccaattaactgaactggcacaatttgaattaagtcaccaggatttaagttaataagaataacaccgctggatacgtctacttcaccagtaccaataacgttagaacgaactgctgtacctgatccaggaataatgttagctggtgtatttaatgataagaagaaacgaccagcttctggtgcagtaggtacgttatcaagactaattgttaatgtataactaatttgataaataccagctcgtagaattcgaatgccatctccgacacttactgtatcatttattacaggaacagtaatatttgggtttggacttacgctaggtaataatagtggtgtaaatagtgaagcaaactgaggtgcagacgcgttgaaagcaaaaccaaaggcaggtagtgtactagctggcttcgcctcacaatcgattttagtaaattcgcaatcagaagagaacatgtttttcactcctttatctgtttctactttcagttaatgaaaaggacaggttctatgttctagacaagttcccaattttaagaaatttacataagaatactctttaagcatggattgggtggcagaatactctgccacccaatccatgcttaactcattatttagttttaaatagaaacatcacgtaagcattgaatagcgcagaagcaacttaaatcaacagtaatgcaagtggaggttgatattagtcttgcatttggtacagctaaaaacgtacagattgggtcgtcaccaggtggtacagcggtaccatcacctaaaactacagttaatacacgcaatacagcacagtcatcatcatctatactttctacgcggaaaataggagatcggcagctagtaaggcttgaagatggtgcaaatgcttcaaaaggttctccagtttttgtgtataaaataaaaggacgtgtattcgctactgatgcattgttatgtgcacctaaaaatggaacttcgcaaccagatccacatgttgtcgttgcacattcttgtagttcatgtataaaacgaacaacattcgatacacagttgaaatcacactcatgttgatgatcttcattacaattgcagctcattatgttcactccttctcgtgagttctgacatacactattacaatatgagtgggatatggctgatattacgttaattctcacgataaaaacaaggaatttatataggagggatgtacataacgtgatataaaaaaagacatccttatttagtggatgtcttttcaggtaaatcttttcgcacagtatataaaaaacgagatatatctaatttctttcctctgaaaaattgcggagaagaaatgtaaagttcttctttcgcacgtgtaatggcaacataaagtaatcggcgttcttcttctaacgcttcagaagtttccgtaacacgatcatttgcatcttttaaagaagaagtatgaggcaggattccatcactcgctccaagtaaaaagacacatggaaattcaaggccttttgcgttatgaattgacataagtgaaacggcatctttttgcggcattgtttttaatgcttccatttctttttgaccttgaatcgcctcgtcgataaattgtaaataagctggaatatcggtgaaacgagttgcagactccattaattcttccaacatttcttcttgtatgtctttatgcattgtaaaggaagaacgatcgttattttgtaagtactctaaatattttcctttaccatgaatgatttcttttaatgcttttttcggttctaattctttaataaacttaataaaatcgatgcgctcatttacctttttcacttgaaaaggttttaagcttggatttaatagtaagaaatgaagaagagaagggaagcgcccctcaccatatttccattgttcacgttcaataaatgaaatacaatcatcacgtccgatatacatcgtcggcaatatgtttgaaagtgattctagtcgaaacggctcaatcacgagtcttaaatgatctaatacaggcttaattaaagaatgttcataaaatgattggctcgctccgtgtttaataaacgggattttatgaatggtaagctgatcaagtaacgaacgacttacagaatgtgtgcgatacagtaaacaaaaatctttaaagttacgttcaccactctctactttttcttgaataagctgcaaaatttgatttgcttcatcaagagtcgtagcaggtcttgcataaaaaggttgtacaccttcctcacgaacagagtatagctctttatcaaaacgttcttgatttaattttataacttcatttccaagcccgacgataaagggattggatcgataattcgtatttagtgcaatgattgttgtgttatcaaattcttttggaaaagataaaataatttggtgacttgctcctcgccagccgtatatcgcctggtcgtcatcacctgcgataaataaattatttcttggcgtggctaacaattttacgatttcatattgtgcatacgatgtatcttgaaactcatctacttcaatatagtgaaaacgttgttgtaattgagttagtaaaggagcattattttctaacatataatatgtttccaataagatgtcatcgaaatcaatataattgtatctttgttttacctcttcaaaacgttcgtatacttctttaaattcttgttcgactggtgttttcgcttttacatctttcggacgatttaatttgtttttctcaagtgaaatcatcgcgagcatcgtttcagcatcataatcgtcttttaaacgcaattcttttaagattttctttatcataatttgtttatgtttttcatttgctaaaatttgctgattataaccttgactacgaagtaattttaagaaaacagagtggaatgtaccagcaactacgtagctacttgctgcatgattcatacctggtaacttcgcaacacgacttcgtatttcttcagctgctttttgtgtaaatgtaagtaataaaatatttcgtggatgaacttgttttacatttactaaataaccaacgcgagttgttaaaacagatgttttcccgcttccggcaccagctagtgtaagaacaggaccttctgttgtgcgcacggcttctaattgtttttcgtttaaaaaaacattttgttgttcaagagcgcggaaataagccgcatctacatcttcttccataattaaatgggtagatgttttcggaatatgatatgtcgcacgcggaatatcagcgtgtgttaacgatttttgtgaaaatttttcttgtgtcatatgttcaccttcaaaactatagcatcaacatttaactttagcggaagaaaaagaaaatagcaatgtaaaaaaacaggagggatcacctcctgctttcaaattacaattcttttatcattacgacgtgcgggatattcgcttccataaatacatcagaacttgttacatatccaagttttttatagaaatcttcggcatgtgtttgagcgtgaagtttcaatttcggtagcgaattttcttttgcatacgcttcaagagaatccataacaatttttccaatcccttttttgcgatgggaatttagcacgcaaatgcgttccatttttcctataccatcaaggatgcgaaaacgtccagcaccaactggaacatcattgtcatatataacaacgtgtgttgaaatttcttcaaactcatcgtactcttcttcagcagagacacgttgttcatttacaaacacttgtttacgtacagagaatgcatctcttagttgttcgtccgtttgtacaatctgtgcgtgcaaattagttgttcccctttccaagacggaatgtttcgtgtacagtccatgttccattttctaattgatatagaagatggaaacgatcaattggttgttcgtaatagaaatctttcatacgtaatcggcccaacacatcagcatgctctgcatctgataagccttgtccgattgttaaatgaggtacgaaagcatattcgcgttcttgcgtgaataacccgctatgcatttcttcatttaagaaagtaagttcaggtgttttttctactttaaagtaaaggacgttattaacaggtgcgaatgaaccaactttcccaacatgaagggtgaaagggttcgttttacttgcgattgtatgtaactcgtttacaatcgactctaattgttcatcttgcgcctcaaagggtgttttcaatgtaatatgtggcggaactaatgcgtagtgcgggtcataacgtttacgcaatccgttcgctttatcttgaatcattttagatggaaaaattacaatgcctaatttcatgttccaattcctccctttgtaagtctagttagattttgagataaataaatctctttatctattatatcaaattattctgaatactgctctctattatttcattgatagaatatgagagaaggctttcggtaaatcagtctgccaatatttccaagtatgattgccttcaaattcctcataatgcgtgatgaagtttctatctgtaagaagtgtatttaactcacggttcggccctacgaaatcagatacttgtccatcagtacgctttacagccgtttcttctgtaccgatgacgtgatacagttctaacgcctgtggatctttgaattcttttgctaagttcatcactgtctcatccacaaatggtgattgcataacgactttaccgaatgtatgcggatacataagtgcagtcataaaggaaactgttccgccaagagaatcaccaattaaaacacgaccttttcccatttggtacgttggataattttcatcaatatatggtgcaagttcatgagcaaggaaacgaatatatgcagcattttttacttcatttgggaaatatttttctttacgatcatgtacatttttatatggaataccgacaataattgtacggtcaatttcttcggtttcacgaaggcgctcaattacacggtgcgctttaccaagctgaaaataatctctaccatcttgtgcaattacaactgtatgtttgtgcagtggtgtgtaatttactggtaaataaacgagaagtgtaacatcttcttgaagtgatgcgctataaaatgaaatttcttcaattctccctattgtttgactcatgtagatccccctaaataaaaatttactgtaacgattgtaagagcgacgcttgtagtgaaaaggaaagaaatattcactaattggtgccttaatttctattttaccataatgatacgaagaatctaaaaaattagtatttaagttgcgaaagaaaacggatataatgaagtgggatttttgacaggtgagaggggagacaggatttgaaacaagaaaaatcaatcgcactaccattagcaatttctataattgccatttcctttgcagcagtttttgtaaagatgtcctcagcaccatcttcaatattaagtatgtaccgcttatggattatcgtacttattatgctgcctatcgtatggaaaaaaagagaggaatttaataggattcaaatgaaagattggggctttttaattggatctggtttctttttagcacttcattttcttttatggtttgaatctttaaagcatacaacagttgctagttcaacaattattttggcacttcaaccaatcgtatctttagttggaggtttttttctatttaaagaaagaacaacatattcagccattgcaacgatgggaatcgctattttaggagtaatgtgcattggttggggagatttaggtttaagtaagcaagcaatttatggtgacatattatcctttctaagtgtaatagcggttgtcggttatttatttatcgggcaaacgacagtgaagaaagtatcgcactggatttatagctttacagtctttgcgttcgcaggtctttttatggggatttataatgttatattacaagtaccctttacaggttatacgaagtgggattggactgtttttcttttacttgcggttgtgccgacagtgtcacatgtaattaataactggctattaaattatgtaaatgcaacgacaatttcaatgagtattttaggagaacctgttggagcatctatacttgcgttcttcttacttggagaaaaattaaatgcaatgcaaatgatcggtagcatgctcgtattgtttggtgtatctgttttcttactgcagcaacaaaagcgaacagcaaaaaatgtcgtaaatgagccagtgtatacacaggaattatagtgttaggggagaaaagagaagttgtgatacttctctttttgttttatagaaatacgggcgtagaagggggaagaaaatggaagagatattaaagaagtatatgaatagatttacaacactaagtgaagaagagcagcaaatgattctcagtgaattacaaattgaagaatataaaaaaggaacagtgctcctaagacaaggaaatgttccgttaaaatgttattttgtattaaaaggatgcgttaggcaacatagtatagatgaagcagggaaagaagttacatcaaatttttatacagaagagcaggcaatttcgaatttcaaccatcataaacaagataaatcttcatcatatacgttaacgtgtttagaagattgtactgtagttgttggtgatctacatagtgaaaaggacatgtataataagtattcacaattagaagaaatgacgcgtaaaatgatcgagtacaatttcggtgaagtacaagatgaacttgctgtatttatctcatcgacaccagaagagcgatataaaacattgttacgaaaacgcccgtatttaattcatcgtgttccacaatatcagctagcaagctatcttggcatgacaccagaatcattaagtagaattaagaaacggcttaattagagtgtttaccacctttcaatagtagccatatcgcaagtcctaattcacctgcaatcataggtaattggaatagtgattgtatgagtgaaatcattgtatcgtattgtgtaaacattgtattcatgacgtgaattagcatataaccggtagcagcaatgaacagcagtatactaataaactttggtatctgtttagagagaaaagctacatagcctaaaacgaaaagatgcaatccaaaaatgatcaatcctacagaccaaatgtattcgaatgcactgagaaacaacattgtatatgtttctggatttgcaattgtattttttgaaagcaataatgccaatattagattgaatatagcaatcccaagtatagctgtatacataagacgaagcaaagcggctagtaatgagaggctagtatgaattggttttagaaagaaataaagagcccacgcagcgacaatatcagtgataaaaatgataatccacccaaaaacttccgctttgaaaagtgaatttgaagtttggatattatggaatgttgtactcgcatctccttgtataacgaggtttccatgaacaaaaccgtaagagaaaaatgcaatgaatgccataacaagaagagatgtgctagcaaataaggcgtactttcgttcagtcataatatgtcctccttttctaatattgttttcattgtaatagggaagaggaggagattcattgacttaaatcaagacggggaaagtttagtagagtttccatcaaaaaaaatgtatggttatatccaattttttattaaccttgtaaaaagtaaaaactcaaatattgaaatcaagtaaaagagtggctacgaagccactcttttactttggatttgtcatataaggttgtacatgaatgacacataggtcacgaaatttgccttcagcagttgtgacaattacgactgctttacctgcactttttccagtaatcgtcacggtgtcaccttttggatatatggtgatgatatcagaattcatatttgaccaaataagctctttattcgttgcttgtattggtaaaatggaagctgataacacaatgttttgtcccgtttttatttttaatttatgtttttccatatgaacaccgatgactgaaataacagaaggagcaattgaaattttaggcgggttaggttgcatgtttaaacaagacgcagaagtatttgtgataggtgaaaattttcgtgtttgttgttgctggaaagctgctaacatgttggagtcccctttctgtataagtgctgatactcatactataaaggagtagtgttatgttaaatttaacgaaacataaagaatttgttaaatttgataaaaagattgtcgaactgtaaaaaatctctgctgttatgataacagcagagatttttttataaattatgacgatgttgtttttcgaaatcctcaaattgctctttaacttcttttgaaggttgtgttagtaaactaacaattacgatggctagtaaactaatagcgaaacctggaatcatttcatataagaaatcttttaagaatttgaattgagtccatataataacagtaacggcaccagaaatcataccggcaagtgcgccccacttcgtcatacgtttccaatataagcttaataaaatagcaggtccgaatgaagaaccaaatccagcccaagcgtatccaacaagagctaaaatcgtatcattttgtttaaacgctaatgcgcacccaactaatgcaataacaagtacagccatacgaccgacaaatacaagttctttatcagatgcagaacgtttgaagaatgtacgatataaatcttcagttacagcactagaagtaacgagtagctgtgatgaaattgtactcataatcgctgctagaatggctgctaataaaaatccagtaataagtggatggaataaaattttcccaagttcaaggaaaattgtctctggattagataatgtcaactcttgttgtgaatagtaagcaataccaataagaccagtaaacatagctccaacaacagagaaaatcatccagctcataccaattcttcgtgcacttttaagttcttttacagaagaaattgccataaagcgtacgataatatgaggttgtccgacataaccaaggccccatgcgaatagagaaatcattcctaaagtagaggcacctttaaaaatatctagacgtgttggatctacagatcgaattgtatcaaatgcaggtccaagtccgttcgaattcataattgttacgataggaacaagaataagagcgactaccataatgattccttgcacgaagtctgtccaacttactgctaagaacccaccaaataatgtgtaagctacaacaacgcctgcaacaatgaataatccaacgtggtagttcataccaaatgaattttcaaataatacagcgcctgaaactaatcctgaagctacatagaaagtaaagaaaatcataataacaagtccagatactaaacgtagcatatgagatttgtcgtggaaacggtgttccaaaaattctggaatagtaatagagttatttgcaatttctgagtaggtacgtaagcgaggagcaacataaagccagtttgcgtatgcgcctagtgttaggccgatcgcaatccaactactacttaatccaacgctaaacattgcacctggtaatcccattaaaagccaaccactcatatcggatgctccagcacttaatgccgttactgcggggcctagtgtacgcccgccaagcatataatctgttaagttggacgttcgtttataggcgaaatagccgattactaacatcccgagcatgtaaatagagattgaagttaaagttaacatctgcgtactcatgaagttccccttccttttgtcatgtcttttgatgcgttatgcatatttatcccgcataaacgggcagtaaaattcccaccttaaaattggctgggcaaggaagttaggtgggagagcaactgcccgtaaatgcccgattgatttaactaataatcagtgggatgaacaaacccctactgattaaagtttcactttataatctatcatgattattctgaaaaatccatatagaaatacgaattttcagaaatgtaagcgttttttgatgtcattttacttttttaatatataatattcatacaaaaaaccttatttttaatagagtatttattatatttacataaaaagaggttgttttgtcaatataatattgaaaggaaagaaaaataaaatttttgaaaaagtattgacttgtgaaaaaagtcaggtctataatgagtgcaacttaaaaaaatgcaagcgttgatgaagaagagtacacatgatgaacatgtcagagagctgatggttggtgcgaatcagtatggaattgatgtggaatgggcttcggagcttccaaaccgaaacgaaagaagtaggctttggcgacatgatctcatcgatacaagagacacgtattgtttttgatacggtaaagtgcgttacatttgtaacgaattaaggtggcaccacgggagtacccgtcctttctataggatgagtactccctttttgtgtataaaaaattaaataaatgaaatcgtttaagtaagaagagtacgtatattggagacgttacagagagccgggaataggtgggagcccggtacggtgccgtatacggaatgggcttacgagaggtatgctgaacaattattttcagtaggcaacccgggttccgccgttacaaggataaggtataaattttgtacctgaacaaagcgggatgcttttgcatccaacacgaggtggtaccgcggtatatttatcgtcctctacatattttcgatatgtagaggacttttttatttttcagagcgaggtgaaggacatgatgacgaaagaagaatttataaaacaaaaaagagagagaaagacatttttagtaatcactgaagaagaaggagatagcattacgccaatttctttatatagacgtatgaaagggaagaagaaattcttattagaaagttcacagcttcatcaagataaagggcgttattcttacttgggatgtaatccttatggagaagtgaaaagcgttggtacgggagtggaacgaacgatttacggccgcgcagaaaagttacaaggtaacgtactacaagtgttagaagaagtaattgcaccatcacaagtagacagtccatttccattttgcggaggagcagttggttatattgggtatgatgtcattcggcagtatgaaaacattggagcggatttacacgacccattaaatattccagaagtacaccttttactatatcgtgagtttatcgtttacgatcatttacgccaaaagttgtcgtttgtatatgtatgcaagcaagatgattcagcagattatgaagaagtatacgaaaggctgcgagtatacaaagaggaagtgctacaaggagaagaagctgaagtaaatgcaatacaatccacattatcatttacttcttctataacggaaaaagagttttgtgagatggtagaaattgcgaaagaatatataagagcaggagacatattccaagtcgtattatcacagcgtttacaaagtgaatgtattggggatccattcgggttataccgaaaacttcgaattgcaaatccatcaccatatatgttctatatcgattttcaagattatgttgtactcggttcttcgccggaaagtttactatcagtaagggaggataaagtgatgacgaatccaattgctggtacaaggccgagggggaaaacgaagagggaagatgaggaaatcgcaaaagaactgttaggcaatgagaaagagcgagcagagcatatgatgcttgtagatcttgggcgaaacgatattggtagagtgagcgaaatcggctcggttacgatagataaatatatgaaagtagaaaaatactctcacgttatgcacattgtatctgaagtttacggaacattgcgaaaacaaatgggcggatttgatgcgttagcgtattgcttaccagcagggacggtttctggagctccgaaaattagagcgatggaaattataaatgaactagagaatgaaaaaagaaatgtatacgctggtgcagttggatacgttagtttttcaggaaatcttgatatggcgctcgccattcgaacgatggtcgtaaaggatgaaaaagcatacgttcaggcaggagcaggagtcgtttacgattcagatccagtagctgaatatgaagaaacattaaataaagcgagagcgcttttggaggtaatgaaatgattgtacttattgataattacgattcgttcacatataacttgtatcaactgttaggcgaacatgaagaagaaattgtagttgtaagaaatgatgaaataacgatagaacagttagaagagatgaatccaagaggaattgtactttcaccaggaccaggaaaaccagaggatgctggcatttgtatcgacgtcatccgtcatttttataagaacgttcccatattagggatttgtcttggccaccaagcgatcatatctgcatttggaggagacattgttagagcagagcgtattaaacacggaaaaacatcgcgtgtgaaacataacggaacgtcaatcttttcatatgttacacagcccctaacggcgatgcgctatcattcccttgttgcagagcaaacgagcttgccaaagtgctttgacatattagcgacagcgatggacgacggagaaataatggcagtccgtcacaattattatccgctcttcggattacagtttcatccggaatcaatcgcaacagaagaaggcggaaagttaatccgtgcctttttaacagaagtaaaagaggaggaaagagtatgaacaactatcttcgtaaattagtggagggtcaacatttaacagaagaggaaatgtataaagcaggactacttttattaagtgaaaacatattagaaagtgaaattgcagctttcttagtcttactgaaagcgaaaggtgaaactgcagaagaaatatacggtctcgttcgagctcttcgcgaaaaggcattgccgttttcgaaccatatacaaggagcaatggacaattgcgggacgggtggtggtgatgctcaaacgtttaatattagcacaacatcagcattcgtactggcaggagcaggtgtaaaggttgcaaaacatggtaatcgtgctgtttctagtaaaacaggaagtgcagacttattagaagaactaggtgtaaatattagtagtacgccaaacgaaattgattatttactagagcatgtaggtattgcatttttatttgcaccagcgatgcatccagcactaaggcgcattatgaaaataagaaaagagttaaacgtgccgacgatctttaacttaattggccctttaacaaatccagtgaatttagaaacacaatttgtcggtatttataaacgagatatgttattaccagttgcacaagtattacaaaagttaggccggaaacaagcgcttgtcgtaaatggaagtggttttttagatgaagcgtcattacaaggggaaaatcacgtagtccttttaaaagataatgaaatagtagaaaagagtattaatccagaaaagtatggtttttcaagagtgaaaaatgaagaaattagaggggggaattcaaaagaaaatgcaaagattacgcttgaagtattgagcggagaaaagagtgtttatcgtgatacagttttattaaatgcaggtctagctcttttcgcaaatggaaaaacggaaacgattgaagaaggaattaaactcgcggcacatagcattgactctggaaaagcattagccaaattaaacttattaattgtagcaagcaacgaaaaattagaaagggtgaactaaagtggggacgattttagataaaattgtagaacagaagaaaaaggaagttgcggagttatatgaaatatatacaccagtaaaaacaaaaagaaagacacattcacttgtagaagcgttacagcagtttactgtcattgcagaagtaaagcgagcatcaccatcaaaaggagatatcaatttacacgttgacgtacgaaaacaagtgggaacatatgagaaatgtggtgcaggagcagtatctgttttaacagatggtcaattttttaaaggatcgtttcacgatttacaaacagcaagagaagaaagtaacattccgcttttatgtaaagatttcataatcgataagattcaaatcgatagagcgtatgaagcgggagcagatattattttactaatcgtagcagcgttaacgaaagagaagttaaaagagttgtatagctacgtgttagaaaaaggattggaagcgattgttgaagttcataatgaacaggaattagaaactgcgattgtattaaatccgcacgttattggtattaataaccgtaatttaaaaacgttcgaagtagatttaagccaaactgaaaagcttggaaaaagattgaatgaggagaaattactttggattagtgaaagcgggattcattcaaaagaggatattattcgtgttaaaaaagcaggagcaaaaggtgtattaattggagaggcacttatgacatcatcttctattagtaacttttttgaagactgtaaggtgaatatatgaaagtgaaaatttgcggcatcactgatatggaaacagcaaaacgtgcttgcgaatacggcgcagatgcactcggatttgtttttgcagaaagtaagcggaaaatcactccaaagagagcggaagaaatcattcaggagcttccagccaacgtgttaaaaatcggtgttttcgtaaatgaatcagtagaagtgatccagaaaattgcagatgagtgcgggttaacacatgtacaactacatggagatgaagataattatcaaattagaagattgaatattccgtctataaaatcactaggagtaacttcagaaagtgatatgaaaaatgctcaaacatatgaaacggattatatattgtttgatagcccgaaagaaaagtttcacggaggaaatgggaagacattttcatgggaactacttgtgcatatgccagaagagttgcgagagaaaacgatattagctggtggattaaacgctcttaatatagaagaagcgattcgaactattcagccatacatggtcgatgtaagtagcggagtagagacagaaggaaagaaagatctaaagaaaataaaacaatttattaaacaagcgaaggagtgttccaaatgaattacgcatatccagatgaaaaaggtcactacggtatatatggaggacgatacgttccagaaacgttaatgcaatctgtattagaactagaagaagcatataaagaagcgatgcaagatgaagcgtttcaaaaggaattaaatcattatttaaaaacgtacgttggaagagaaacaccgctttatttcgctgaaaatatgacgaagtattgcggtggtgcaaagatttatttaaaacgtgaagatttgaaccatacaggagctcataaaattaacaatacaatcggtcaggcactacttgcagtacgaatgggcaagaaaaaagttgtcgctgaaacaggggctggacaacacggagtggcaaccgctactgtatgtgccctactcggattagaatgtgtcatctttatgggagaagaagatgtgagacgtcaaaaattaaatgtgttccgaatggaattactcggagcgaaagtagaaagtgtagcggcaggtagcggcacattaaaagatgcggtaaatgaggcgcttcgttactgggttgcacacgtgcacgatacgcactacattatgggatctgttctcggaccacatccattcccgcaaattgtccgtgatttccaaagtgtaattggaaatgaaacgaaaaaacaatatgaggagttagaaggaaagttaccagaagcagtcgttgcttgtattggcggtggtagtaatgcgatgggtatgttttatccattcgtacacgatgaagaagttgctctttacggcgtagaagcagcagggaaaggcgttcatacagaacagcacgcagctactttaacgaaaggaagcgttggggttttacacggatcgatgatgtaccttctgcaaaatgaagaaggacaaattcaagaagctcattctatttcagcagggctcgattacccgggtgttgggccagaacatagcttactaaaagatattggccgtgtttcttatcattcgattacagatgatgaagcgttagaagcatttcaattattaacgaaaaaagaagggattattccggctttagaaagctcacatgctgtcgcatacgctttaaaattagcgccgcaaatgaagaaagacgaaggacttgttatttgtttatcaggccgcggggataaagatgtagagagtataaaacgttatatggaagaggtgtaaaaaatgggagtagaaaaaattaaagcagcgtttgaaaatggtaagaaagcatttattccgtacgtaatgggcggagatggtggctttgaaaaattaaaagaaagaattcgttttttagatgaagcaggagcgagcatcgttgaaatcggcattcctttttcggatccagtcgcagacggtccaacgattcaaagagcagggaaacgagcgctagatagcggtgtaacagtaaaaggtatttttcaagcattaatagaggtaaggaaagaagtgcaaattccgtttgtactcatgacatatttaaatccagtacttgcattcggaaaagaacgattcatcgaaaactgtatagaagcaggtgtagacggcatcatcgttccagacttaccgtatgaagaacaaaatattattgcgtcgttacttcgagaggcaaacattgcgctcattccactcgttaccgtaacgagtcctattgaaagaattgaaaaaattacgagtgaatcagaagggttcgtttatgctgttacagtagcgggcgtaacgggagtacgtcaaaactttaaagaggagattcatagttacttagaaaaagtaaaatcacacgtcaacttaccagtagtcgctggatttggcatctcaacaaaagaacatgtagaagaaatggttacaatatgcgacggagttgtcgttggaagtaagatcattgagcttttagaaaatgaaaagcaagaagaaatatgtgaattaatatatgcaacaaaacaaaaagaagaggcgtagtctcttctttttgttttgcgtaataaatgttaaaatatacagaaaatacatataatttagagggtgagaaggcatgctaagacgtaaactactatatctatttttaactgtaccgctatacgcttggctcattagcatgacgaaaatagagttaatggctctatttttagggtatgtattcatcttttccaacttaaatcgcattcaagaacagtctattttagaaatatgtctattttcgattagtatagaattatttagtatcgtttcgattgtattattaaacgaattatttctacggattcattcatttacattaatgaaattttggaatattatattgcaagcaatatgtacttacattgtgtttgttgtgttgaaagaaatagtcggaaagcagaccgtttttcaggataatagaaaatgggagtgaatgaaaaggagccgtttggttccttttttgaatctgttgtaaaaacaattgaaaattatagtatctgttatataatagttaaaaattgtattttaaacgaaatgagatgataacatggccatattgttggcacttatcccaattatgatgattttcatttgtttatttttatttaaacaaacgtcattaaggtcctcgttaatttcttatgctgtgtctgttggaatcgttttactctcgccaatgtttcaattagggataagtgaaactgtgcacgcaacgattaaaggatggttaatttgttttattgtcgggtacgttttatttttcggtatttttttatttcacctcatgaacaaaatggggtacatcgatcaagtagcacgttttctagaagcagttactcaggatcgcttattacaaatgctgcttatgtgttttggcatttgcccgcttattgaatcagtaagtggattcggtattggcttcatggttgcagcacctatttttctttcactaggatataaaccatttcaagctgtactactctcattcatcggcttactagctagttcatggggcgcaatggcaactggtacgattatcggttcgcagctaataaatatgcctcttacaacatttggcacaaatacagcgctattaagtattccgatgtttgcttacttcgttattctttctttacacgttgttggcggctggcaagcggttatagaaaagtggaaagaaggagtagggttctttctattattttctctcggaatctatctttctaatgcgtacgtaagtgttgaactagccgggatattaagttctatcgttacgattacctttggcttttttatcattaaattaaaaggaaaaagtgggcaaaatcttataacagaacatgcggctgcaacggagagagaagtatccattataaaaattattagcccttatatatttctaacagtttgtattttactttctcgcctcgttccagcattacatgatttgttcagatcatatgcggttcttgatttgaaatcatactcttacaaactagagttactatattcaccaggattttggctcggtatgacttgcttatttactattattttcttccgcatcccgtctaatattattaaacaatcactctcacaaacgattaaacaatggattccatttgctattacgacgacaatgtttatcgccatttcagaactaatgggtgcatctggcatgcattcattactcgcaaagacagctggtgaaacatttggaacctttttcgttttcgttgctccgtttattggcgctattggtggatttttaacaggtagtaacgcaggatcaaatgcaatgtttataaaactacaaatgcaaaccgcacaaaacgtagcactcccgtggcaatatgtcacaacacttcaaaacaccgcatcatcagtagcgacaattgcttgtccatcacggattacactaggtgcttacttatgtaatatcccttaccgtgaaaatgaactattaaagaagacgacgttaatgatctttggtgcgattttgcttgtagtggtagaagttattgtttggtatatgttgagaaattaaaaatcctcctaacataggaggattttttttatgagtggataatgatttaaatatgaatagcttctactaaatgaataggagatgaaatgtatgcccctaaaaaactacggtgtgttaaaaggtacagttatacaatcaaagattggaaaagggaaaacacctcattatcaagttcatttacagggcgagacaggagtaaattatcgtattgcaattaacgtaaaatcgcaaagctatccgtcagaagttttatattttgcgagtaacaatattaagtcagaggcgattcatattttaccgacattaccattcgattttacagaaataaaaaacaatgaaccgaaagtagctttagattatgtaagaggaaatctatttgactcaaatcaaatgattcctttgcctcccgaaaaagcaggagcagataatgatttaaatgaaaaaatagaacgttatataaaacgagcaatagaagaaaaagcaattatttacgcgtttggtgaaagatggggaccagaagaaaatacaccagattcctattttcatttcaaaccaggaaacggtatacatgatattcatatgaatcaagggaatgtagaaaaatggcaaggtgatgatggcatatggcaagatggaggaatactcattcactttgaaaaggaagaagaatggatcggtatctttcttgccttccaatcacagtcatggtgtaccgatgaagaggggcatgctcgtgtgcctgttgagcattgtgattataaggggaataattaataagaagagggcgttcaaaaagaacgccctcttcttattttataaaacgaaaaactaacgagtgtagaaagacaagagaacagcagtgccacactagaaaacgcaatgagatacatattatatttcataacctgtccaattagctgattactgtcgtattgaaacagtcctgctattatgttgaataaaaataacacgataaacatgacgacaacaccgtctattgatcctttaatgtctggtttacttaaagcgatatgcgcggaaatgcaaatggcgataaataaaaataaccaaaaggaaggattcaataaattgccgattgtaaataagcttttcaataatacaaacgtcgacaagagcatgttttggatcatttctacattaatagaagtagaagcaatcgttttttcgagagttgtattaaataaaaaatatgattctggtacgaaatagcgcattaaaaggattaacgcagtaataccagaaataataggcccaatgccgatgaagaaattcccaatccgttgatacacacttttttgattgtattgatgttgtacgtaacctaaagccccttgacttgtatctgtcgggaagaactgcgttgctacaatcttatgacggaacagcacgcacataatggcatgtccaagttcgtgaataggaacaccaatccaagccgttaataggaatccttttcgtccaaaagctctcgaccaatacatccgtgtgagagattctaaatagcctaatagaaatccaattacaatgataacgccaattaaagataataattggattacgcttgtaaggagtatttgaaaaattgagtttaccaattccattgccagtcatccaatctgttaaaaatattatttattctgtttcataatagcattttttttcaagattactagcacatatattttctttcggaagaaggatttcagaatctttttcttgtagtcatgttttatgtacaaattcatatattgaatttgtaacaccctatacggtatatccttaaggagggataagagaatgaaatgtccgtcatgtcatacagaaaatgcagcggaggcaaaattttgcgggaattgtggacattcgttaacggaagaagtagtggcaagtagtggccaagaagaagggccggaacaagcacgtgcggcacaagcaaaggaagctcggcaaaatgaaacggtagagcaagcgaagcggtttgcgagcggctattttcaattttttaaacatgcattacaagcaccgacagcgattatgcaaagcggcgctattgaagtacgaaatggaattgtaagtcttgttcttatttgttttttaggagcatgtattttttatagaatgatgagtgcagcatcagcagttacgagaacatttgcaccagatatatctactcccacgttttttgtagaatctataacggtctttttctttttattaattttaactttatttgtcggatttattatttttgtaagtggtaagatgatgaaatcatctttttcgtttcttgaagtattcggtatatggggaacgatagcgacgccggctattgtcatattagtcctttcttttctttttagtttcttattaatctttttcttaccgatattattatccgtagctgcaacttatatagggattagtataactgtagccgtattaaagctagacaatggcggattagatctcgtttacacacttattattgcaaatgttttaattggaattgcaacattcattgtactttggtcttacattagcacgataattcaagccttaacacagggaataactggcttctaatgaaaaggtggttgactggatgaatgtatgtacaaagtgcggagttcagtttgaagatggtgtgcagttttgtcaaaactgcgggacgaagaggggacgttctgtagtaaagaagaacatgagcggtggtgtaaaagttggcattacactgttagcgctatttgttatagcgattattggattgtatttgtacggattgtcgtattatacgcaggtggcacaagtagaccggatgattacgattttacaagagagggacggagagaaattagctgagatcgttacggcagatgatccatcggttatgataacgagagagagcgtaacgcctctattttcatatataaaagaaaatccatcttacgtgaatgaattaaaagaatatttgagacaaggtgaaaaacaacgggacggaatagaaagagctgatttttcattaacgaaagacggaaagtatttctttatatttgatcgatataaattgaaagcgaagacgtactatgcaactttgctttcaaatgaaaaagacgtatcgttaaaaatgaacggaaaagaaattgataagacagatgacaaaaagtttgagaagcaatatgggccatttcttccgggaaatcaagtgtttcaatcagaatataaaaatgactacgtaaaactatcacgtgaggaaaaggttgtacttatgaaacaaagccaaaataacgtaacgatagatttaacgttgcaaggtcaatatattacagttcaaacgaacgcgcctggtgcaacattgtacgtaaatcaaaaaccagttacagcgctcgcaggagaagaaattacatgggggcctgtagcgactgatggaagcgcgaaaatttatttagaacgaaatggagaaaatggacgggaaacgacaaaagtagagacggtaacggcactttcgtcttataatcttccattccaaacgaaaagtgcagaaaaaacagttgtttataatgttactccaacgcccgcaactgggtatgtatataatggtttcatctttcctgatagtgatattcgaaaattaacgagcacagatttaacatatttatcgaaagaacagttgaaaattgctagaaatgaaatatatgcaaggcatggacatatttttcaaacgaaagatatgcaagcgtattttgcaaaacagtcttggtatagagaaaatccttattttacaggaaagttaacagatatcgaaacttataatattgaactaattaaatcaagagaatagagcgcgggaaaaaggtacagtgtatattactgtaccttttctatcgttatttggctggacgaggttccctagagaaaaagatatgaaagagaaatgtgactttacttgcccctcctgatgtactggcttgcacatcagataaagaactagacgttaaagcagcttcagaatgaggagggacgattattttaagagcatcatctgattctgaggatgcagtaactgttattgtatcgtcagaaaaatttaaaattttaacagtaccgactggaaagatggccttgcgagcatgtgatgaagaagcgaagcgggtagctttccagatagtttgtgagaaagtgtcattgtcagataaccaagcacgagcactgtataaagttacactaaccgtaaactcctgttcaagcgggagggcgggtttcggttctatcggttcctctggaagctggacgagaaggccggcgcacatgtatgtttcacctactttcaactggttactgttataggatattaaacatgttgtttataagacacgacagttacctattcaggcataagtttgtgcacaaaatttgaagatgaaattctctttctttacaatggaagtaggtgttatttctataaaatatggaaaacgtaaagagtatgtaaaaaagaaggagtggtaaagtgaactatgtcattattggcggagatgcagctggtatgagtgcagcgatgcaaattgttagaaacgatgaagatgcaaatgttgtaactttagaaaaaggtgaaatttattcgtacgcgcagtgtgggttaccgtatgtcattagtggtgctatcgcttcaacggaaaagttaatcgcgcgtaatgtaaagacgtttcgtgataaatacggaattgatgcgaaagtacgacatgaagtaacgaaagtagatacggagaagaaaattgtgtacgcagagcatacgaagacgaaagatgtctttgaatttccatacgatcgtttattaattgcgactggcgtgcgtcctgttatgccagaatgggaaggacgggaattacaaggtgttcatcttttaaaaacaattccggatgctgagcgcatattaaaaacgctagaaacgaataaagttgaagatgtaaccattattggcggcggtgcaattggacttgagatggcagaaactttcgtcgaacttggtaagaaagtaagaatgattgagagaaatgatcatatcggtacaatttatgatgcagatatggcggaatatatacataaagaagcagataagcatcatattgaaattttaacgaatgaaaatgtaaaagcattcaaagggaatgaacgagtagaagcaattgaaacggataaaggtacgtataaagcagatcttgttttaatgtcggttggagtgaagccaaatactgattttcttgaagggacaaatatacgtaagaatcataaaggagcaatcgaagtaaatgcatacatgcaaacgaatgtgcaagacgtatatgcagccggtgattgcgcaacacattaccacgttataaaggaaattcatgatcatatcccgctcggaacgactgccaataaacaagggcgacttgctggactgaatatgctggataaacgaagagcatttaaaggtacgttaggtacaggcattattaaatttatggatttgacactcgcaagaacaggattaaatgaaaaagaagcgaaagggctacacatcccgtataaaacagtcaaagtagattctacaaatatggcgggctattatccaaatgcaaaaccactttacttaaaattactatatcgctccgatacgaaacaattattgggcgggcaagtaattggagaagaaggggtagataaacggattgatgtgatcgcaatggcgcttttcaataaaatgagtattcacgatttagaagatgtcgacttaagttatgcaccaccatataacagcgtgtgggatccaattcagcaagcggcaaggagagcagaatagcactttttaaagtgctatttttttgttaaaggggaattatcatttttgtcgaatgaagaggatcgggaaatagttacatatgaggaaggggagtttttttatgattgtagcacttcaaaaggttcaagaatcagaaaaagaaatattacgtaatttgtacgctttatatcttcatgacctttctaagttcactatgaatataactatcggagcgaacggattttttgaatacgaagatttgcatatgttttggaaaaatgacggaatcacgccgtattttataaaagttgatcatagtattgtaggattcttattactactggaacgtccgtttttgaagaaggaaaatgattttggtattaatgatattttcatattgaatcaatataaaggaaaaggaatcggtaaacaagtagttgagaatttactagaagagaaaagaggacaatatttcgttatcgaacttctaaaaaatgtaccagcagtgtcgttttggaagaaagtatataaagaattaaacattgaatttgatgagagagcgcagctaattgatgatgaagaatgtcttgttcaaacgtttaaaatttaatgaaattggtgttccttttatattactttgaaatttaactttatcctgctatttgcgggcagtaagaccccactgattaaagtttcactttattttgaatataccgtttccccttgaaaacatattacgtatcgcttatattttcatatagtatttattttttaaacgaagcaatgaacgaaccagggggcgcagtatggcaattaacatgaaaacaatcgaagaatggattgctgaatcaaatgcaagacatgaagaagactttggacacgttgtggaagaaatgaaagaagtatgtgtcggacttgataacgcgacattaatttatacgaaaaatgtattttgtttcggtaaaaaagtagaagtctttttcttcttccaagaccatgtcgtgattggacaagaaaaagacgaatatgttgagattgaaaaattaaagtatgatgacattacaaatagtaacttaaaaacaaatgacaaaaatactacgttagaattaaagtttgctaacggacaatctatcaatttagatagtttaaatgataactacggtacgaaaaattggttatttgctagacaaattaagagtatttttaagttaatctagtaaaaagagcagacctcaataaaatgtaccctatagaatagacacttgaaaaaagtctattctatagggtatttgaaaatgtacatatttattcaagcgttaatgtacatatttaagttagcatttatatttttaagttcaattcccctactcgttccttatcttcatcaccaacccaacaactaaataattcgaaatagtctctatcttccaaataaccttccataaagttaaaagtttttctttcgcttctttttttcctttacattttgccactcgacaagttcaattccccaactagttgaaacctcatatgtgtaatttgtttggaaatgataatcttgtacaatttcaagcatactttcatctgaaaaacacggtccaaaaacaattagattattagaatccggatccgttaacggaatttctacattacagcctatgtaacttgctaaactcattttatactcctccagtattcgtataaaaaatacttcatagtatatttatttacttaaatataaaatccctgcctaaacgaaaaagttttaaatttttatcgtttattaaccatctataactgaaaacatatactatgatgaacgaactcacaaagcataagaaaagagagcatttacaacactctcttttcttacatactctatggaactttacaaaactgaatcaatgatttttattattatattttattacatatacttaggttgtactattatatgtaactctctctctgtatccgcttttttcggatgacgaaaataattaagttcgtactttaacactttatactcaaccatcccgattttaatccctttcgtttcttttaatatagctaataaatcacttacattttcatcatatgactcaaaaattttcgcgccgccctctccttgaaagattactttcatatattctccaccaccttaatttattgatgtggtaaatgacgcgtttaaaacgattcattctttatcctaaaattttcatatgaaaaagaacatcctttccaatcgaatgctcagctttttactaattatccatgttaaatatttattcaaaaacattatatgtattattttttaaattatgttcgatatccattattaaagagtaaatatatgtaataaacttgcataatgaaaaccgtagaatatccactttcgttgaaataattataatccataattttccattgtaattcttaatatttaaatgtaatattgtattgtcttactatctatttataactcacacactaattagaaaaagggaactctatatgagttcccttttctaattatgattacagtcattatttcttttctagaaatttaaatgtatctttaaattctttattattcactttaatatcagcatctttcaataaatcattgactacttgttgtttccatttacctgtcgtatcttgtagtctttgttgttctatatctttacgaattttatcctttacttcatcaaatggcttcaattcttttttatccgtcactttaataatatggtaaccgtaagttgttttaaccggctcacttacttggcctgcatctaatttatacgcagcttcctcaaattctttcactgtttgtccaggggcaaaaccagatatttccccgccctgttcctttgaaccagtatcttctgaatactgttttgctaaggcagcaaaatcttcaccattatttactttctcctttatttctttagccgttttttcatctttcactaaaatgtgacttactttcatttctggtttatagttatctttcacatctttatctgtaactgttgctttaattgctttctcaaatgcaatttctggcttcattttttcttttaattcatcttcatttttcaacccaagttgttctaaagtcgatttaaagttttcacccattttatcttttgcttcttctactttcttttttgcttcctcatctgaaactttatatttatctagcaatgccttacttaacatcatttgatataaagtactttctccatattgttgtcgtaattctttacttaattctttctctgtaacatttcctacttttgatgttactacgttgtctgaggaaccacatgcagataatgctagcatcatgcatgaaataattgttccaataaatattttcttctttttcaattcaaatacctcacttttatcattatgcaaattaactatacacagtcattgtgaaaacagtgtgttttctacatgtaattcatttcatatgagttgactatgtatcatgtattttcatttttaaatataaagagccttcttactatgcatagtaagaaggctctttatataattctcaaaaaaatatagcttctatagttgcttaataattacatgtttttcaggtatccaactattctgtccgatatctaccgcatttcccactctaccccacactcgaaaagatgtcgatccatctatgtttcctttataattcatacattcaggctcttcataataatttactccgtaaccgacaggatattttgaagttgcataaaaccatttcacattaaaatgttttaaatatacccactgcttatcgttccctaaacaaatcatatcttgctcaccgcctccccaataacctgctaagattaaatatggaattttttgagtgagtgtacctgtaaattgaggattcatgaggttttcatataaatttattccatatccatcaggatatttcgaaactgcaataccaatgccatttggttgctgtgtatacactatgttagattgatttgctttgttcgaatttataaaccaagaaagtgacttatttcctactaatcgattcagatcacatttcccaatcccaggaacattccctgaatccgtatattgccacatatcgcatggatatgctggcttattccctccataacgagggatccatacgaaatcagcttcaatattacgtgctccaaatgatagatacgtgtgatgccctacatataatcctactttttccgcacctaaacggcgtaattcatcaataaatgcctgtgtcccgccttgcatatctaccatcgtttgaacttctacgtccgctacccaaaacttagcagattgatcaccacgattccaaaaatcttgtgcctctttctttgcatcagcaatagatataaaacggcaaaaagcataattaccgaatgggatactatgctttttcatttcactaacataattttgatacataaaatccaccgtattagagccatcttgaactctagcaatcactaaatctagctgagatgctgcaatatcccaattgatagttccattccattttgaaatgtctacaatataccccatacattccagctccttttgaatgtcctattcatagctagttttattgtaagcctcagctctctaaaactagctatctataatataagtaaaaagaatctttactgtttttcaaaatatattctctttcagaaatatttctataaactttaacatgtatgccacataaaacattcgaaatataccctactattcatttattatgtaatctcgtcctattaatcatttttacagatattagaaaaaaatccctgttttattaaattataactttcagtatcgatttcctttcaactaaaaaatttcatccctcattttctatatattcttaagtcaaaattactacctctacatgaaatttgagatttagaaaaatttaaattaattgaagtttactccttttaaatcacaattttccaacctgaacactattggtgcataaaaaaagacattttctattaatgaaaatgtctttttacagtttaataaaacaactttggtgctaaatctgtattttgtaattctttattttcactgctcataacacaacttgtggaaaatagaattgggataccacaaatctcatctttcattacatcacgaaatacattggcagcaacacctgtaaacgtttgacataagttagaaatatcgtcattgaaaaactgaatgacttccgcagcgaaaaccggaaagacaacattcggtccgccagggaactgaggctgtaccacaacttgttcaaaataaggattattttctagtgctacttgaaataaatgagctatttcaaatgcatctagtggacaaggaaatggatttacaatttcattctcattattcgttacaataactgtcacacttacattcccaaattgtacaaaagattttaaaagagttactaatgctctcgctttttcgttgcttaacgcatgcactaaaataatataattaccaccaacaggaataagtggcccaactgtaacagttggatcagcacctattgaatttttcaattcattaaaatatgtgatccaaggtggcgaaagctgaacttgtacattcccttccaatattttacactacctccttatacaattcttactagcataatatgtaaaaaactaaaaaatgcatcagttatattaattaaacatcttatttcacattctcaattttccctttacatctttaagcacttttactactatgaaattctttattataagcaaatccactgaaatttcatattatactaatacgactctatatcctttaaattataatactcaatattaggagctgatttcatggaaaaaaaacctatcgtgttcaaaatcccaccaaattcaaaactaaaagttacatttttcggtccttgtaacgaagtaattacaaatgtgtctataattaatcaactatgcgcccctaaatgtcaaactatcacgcaatatccagactttaagaaatatgtaactgaagtacgatcgttatcccgttgttagtccgcataatgcacgattttcacaactttgttacctaaaataactgagaaagaaaataactgcattcctagactaaaattactcattttatgatattccattgataattcattgattttttacacgtttttattaaaagaacatatattatcgtatggagattatccactcataaaacctatctttctttggagcgtacttattatgtatgctctttttttatataaccgtcccccttctaaattgaccaacaatatattaaaattctttatatactcaaggaggtcaaatatgttcaagctgcatccgatactactcatcttaggattgattttgtttttatatagtgtaatcgcctttatgttattcttttcagtgtattagcattacctatacaaagctgtgttcaatatgtaatttctatatagtaaagaaaaaacgtaatgatacgatcttttatgtattccgtctttctgttcaataagaaaactagtaaacttactaacaatgagttttcacaagcatgttacttattattctgtttattatctgaagaagattgaaacctctacaaattaaactacactttacctatttacttatatattttagaaaaacaataatattcccccaccatttggtaaggggattaactaaacctactaaaaaacatttaatgatctgttttatttaattggagaaggaaatcttgctgcttcaaaatgtgccccatcttctaaaggacttaaaaccccatctatactactttgtgcataaatctcaacttcatcccctgcattcaattgaacaatcgtcgaaacacttacgacatttccaaaacttattggaccaaaaaagtcattatcgatagctatcgctgcgtttccattcacacgaatttctacacgcgctctataatttaaagttggatcgtttggaaagaaaccaatcgttccaataatagaatatactcctttagtcttcggcgtaaaaatagatgttgctggattatactcattcgctaaatcaaattgttcattttgaaataacactttcacaaaagtattagcaggaacattttgattcacagtatttctagctctaaatgccgatgctctaacaagattgtccttattatcatgacacttactagtgttcttacaacaatcatgatgcttctttttatactccttacaatacttacagtagtaataacaagacatactaattcccctttcaaacttattactacatattatgtaagattgatttataaggtttggactagctatttttcttattcataagggcgctattaatctgcacccttatttatataaaccacttcattccttactagttataagttgtatatagttccatatggaatagtaagaaaagaacttccgtacggtgtaacatgatgtactggataaaaatactctacggatgagtaatatggttgtactccttgctgctgcatttgttgttgcatttgtaatgcttgctgaatagcttggactgtactttgtgctccactatacgttatagacgtaccatacgctggtcgcatgccagcttcagaattaatatatgaataaaacataattttcaactcacttccgtataatttgttacacattatattatgattctttatttcattgggtactataatgctagtccgctcgcttatattcaaatgacaaaataaaacagtagctgctagactactttgaattcttcttattaccaaatgaaatgatatacatattctcctgttacacgctcatcgattccagcaaccctaacgaacctaagtaaatccgccccttgaagaaaatatatcgacatcgtaaccggtacttgtgaccacatgaattgaaaaagctcattcaccctctgattcgtcgtaatgattaaatcatttacaggtccatgattccatgcagaggtttgaactgaagtgaaagaaaggtctttcccattaatcactattcttgccacgctttgagttatgtccacaataatcccctccaacattacaaaaattggaccttttttagttcatattattataaatattcttgactgtaataaatgtttaaggcaaatccctaataaagtgaaactttaatcagtgggggtcttactgcccgttaatgcgggatacaatttttttattcatatccctcaattcccattacaaccatataatttctaacctgattcaatttttgtaaaagttgaaccagcaaatgtaaattccataaaagtattagaaaaattaaactttacttttgaaggtactctgagaaaaagcgaaaaatcagctggaaagcttatcgatttaaatatttattcgaaattaataagcgattaattttagtcactctgcccatacttaatcaaagtgtcggcttctttaatttctgtataaaattcaaaaatttgacacaatcctggaaaaagcttataaagaaaagtgaggttccgttattttcacacttagtagcgcagccatgttacatacaattttataagtgtgaacgaactacaaaactaaaaaacaaataataagtttgcaacatgtttgcaaatgcgaattttgcatataaattcgtgtgatattgaaaggagttttacttatgaaagaaattaaaacagaacaagaattcaaagacatcatcgcaagcgaggagccagtagttgttaagttctttactacatggtgcccagattgcgtacgtatggacaactttatcggagatgtaatggaagagttcaataaatttgaatggtattctattaataaagatgagtttccaagtatcgctgaagagtatcaagtaatgggtattccaagtttacttgtataccaaaacggtgagaagctaggccacttacatagtgctaacgcaaaaacagaagagcaagttactgagtttttagaagcatactaagatgaaagccctctggaaaatattttccagagggctttcatctgttttcataattatcttttgacgtttttcctcgtttaatgaattacaccttgtcatgataagaataatatgtagtaagaaaagtattcgtttcttgatccatctcccctcctatctctttagtaaatagactctaattaggtttacaccctgactttgtacttttcaacatatttttccttcacgaaactttgttatccccttcttaaaaagctataaaacgtcaacaatgtttgtatagacccacacgactttcgtttgatactctatttatagaaagaaattcctttaaagaaaggtgagtgattaaaatggatactctttctcataaagaagctgataaaggcgctattgtcagcattatggcctacatatttttatcctctatgaaaatcatcatcagttatattaccctctctagcgcattacgtgctgacggtttaaataacttaacggatatcggtgcttctttagcgatattaattggtctaaaaatatctcgtaaacctcgtgacccagatcatccgtatgggcattcgcgggccgaacaaatcgcatcacttgttgcgtccttcattatggcaacagtcggattagaagttgttattagtgccattcaatctttcttaaatccgaaacaagcagcgcctaatatactcgctgcatgggttgctttattttctgctgtcgttatgtactgcgtgtatttgtatacgaaaaaaattgcagcacgaacaaaaagtaaatcattagaagccgctgcaaaggataatttatcagatgcactcgtaagtattggtaccgtagtaggtattgtcggttctcagttccaaatgcctattttagaccctattgccgctttaattgtcggtcttattatttgtaaaactgcatgggagattttcgtagaatcttctcatatgcttacagatggaattgatcctgataaaatggaagaatacgctgatgctattgagcatattggcggtgtggaaaacattgtagatattagagcacgtatgtatgggaatcaaacgtacgttgatattacaattgaagtagatgctcgcatggatgttggagaaagtcactgtattaccgacaacatcgaagctatgcttcgcaaaaagtttggaatttaccatgcacacattcatgttgagccaatgaaaaaagaacctattatgacataggttctttttttatgaacgttttatggaatataacacataaaacgagccagctaccaccagctgcccatcctgctaatatgtcagatggatagtgcacgccaagatatattcggctaactgaaatagataatacaacaaagcttgctataagaataattaacaattttttatgcaacgaaatacgttcttcagtaattgtgacgtatgcaataaatcctaaaaaagcagtagcattcatcgtatgaccgctcggaaaactatatccagttgcagtaacaagctgcgtgacatcaggtcttgctcgttcgtaccatagtttaagcatactgtttaaataacgagatccgtagtaattaattgttagaagtaacgcactaagcaacttttttctaacgagaaaatacattacaagaataatgagtaatggaaaatatattcttttggaaccgataaaagacacccaagtaaaataggtcgtcaaataatcgtttcgaaagctttgaataaaatgtgcgactatattgtcaaagttctcaatacaagcggtatgatacgaaagtgataatacgacaaaacaaatgagtaacgtaaaacttagcaagtataaatgtcgatatcgtttcacatacataacctcactatgcaaaaaaaatggagcggttgttttagttttcctctccatttcttttttatgcatagtttattaaaaaatataattattaattttttgcttcatctcagggatatcttctcttgttacagtgaagcgaataaccttctcatcaagatcaagtgcctcagcgaataaaccagctaatccacgtgattttctatctacttccataattatttctaatcggtcgtatgcacgtggcaaaattaataattctaattcatctaatctgccgtagtactctccagaaaccggaataaactcaaattcttgtgcgaatggaacttgtttacgtaatcgatgcggtaattcttcacattctatatgacgtgctttaaaccctaattcatttacactatctaaaacactacttaataatgcattaggtaacacttgaacgtagtcgcggtcacttgggtctatactacgtttaatatcaagacctgtatgaatccaaaccgttttcataccaagtgtaagtggtgcttcaattggcattggaaaagaaaatggaatgtcaactgtttcatttggttctacagaaaaaggttcggttaagcgtactcgctctaaatcatatgttgctgttacttttttatcatccacttctcgtacatacgacgtcgataatgttaagtaaatgctttcaatttgttggctaactgaacctccagttatatgaacctttccaactatttcttccccaacaatatactcatctttttcaagaacagtatctacctttgcacttccaataccaacgcttgctaaaaacttttgaaacatggagtctccatcctttctaaagcagaagctacatcttgttttaaatcttgtacattctcatagtacggcgtttttatttgtaacattcgcataagcatttcacgattataattttccaaagttaattcttcgtaccatggtttttcctgtttttcattagattcatatcctgcatataataaaaataatgagaaatgaccgagcgcataaaagtcgctacgaaattgaacttctcgcatcaaagcttgttcaccttcgtaagttgtagctcgctcatcatcctcacctttccatttagctaatccaaaatcaataatactaatttgattttctttcattaatatgtttggaatgcgtaaatctcggtgaataatgccttcactatgaaacaccgatacaatttctaatatttcatataaaatttcaaaaacttcacgttctgtatatacatacccatctatgaaaatataatcttcaaaatttttaccagacatgtactccatcacaaagaagctctttttctcccatatgaaatgatcatatagactaggaattgcatgatgatttaatgtttgtaaaatcattttctcttgttcaaatgattttctaccagactcatatctttgtttactttgtcttaattgttttaagactttatatctatttatctgcaaatcattaacgacatatgtaaccccataactgcccattccaattactgattcaattttataatgctctgcaacaattgtattttttcgcagtggtctatcaaataatgctagtacacgacgccatttcatcagctacttgaaaagaagctacggcttttacgttttcttttataatgttgatgtccataaccagatgaacgtcgtttataatcgctacttgaatacgagcgccctctacgacgataatcactacttgaatacgaacgatattttttctttcctaataaagaatcaataatttttttgaacattccttcacctcttgagtaaaatttccttttcattatatcaataattattgactatacttgtgacaggtttgtaaagagtaaaaaacgacgagttatgcccgtcgttactttcattcatcctcttcatcaaaaacttcatcaatcatgcatttctctaataaatactcaaatgtaatatctgcgagatcttcaatttcttctcgttttgggacgtaccctctttcaattagttgctcataaaaaaactccgcaatctcttccgtatcaatcacgacttcaatttccttcatgagcatcactcctttatttctgttttatgaaaaaatctcaaaattatgtatatgagattagaaaaatagattttatttttttataggtcataagctttggacgagatgcatacgattgtagtacaagctattcaaagggggaaataataatggaaaatcaatatgaagtaagacaaacaaaagaagagttcatgcatgaagatcaatgggcagactctcttataaagtggctttttatttttttaatagttgtaggcataccttatactgcatatgttgttgttcaatttattctctctttctagttaactattttttctctgtcaatttaactaaataattatgaacaacatccattacaattttatattcttcatctttaaatgtatcgaacaataattgataatcgttataaatgtcaagtaatccatcaatgatttcttgacgattcgtcttaacactcacttttttcgagttgttaattgactttaactttcctaaatctaatttattcatacctgctttatcttgtttcattttcttcaaaattgcatttgccgtttgagcattggcgagtaacgttaaatctgattcatccgcttctaaccattcaccatccgtaatccgtgacaattcataaattgtatcttcccatgcgtcattcttatatctccatacttctgtacgaaaaccaacaatacggaaaacatctttatcatatccagttacttgcacaagatcaccaaacgtgaaattataatttaattcaatccactccgtatcgccctttttcatatcttgctctgtaacgtgctgcaatgtttgctctacgtaaaatccatcgtgattattgacttcgtatacataaactccatctaaaaccttcatatttgtgattttcccaacggttccatatagcgtaatcacgactatgtcccctacgttgtatttaggttgtttttttcttgccatctctatctctcctttttttgacgtcgtgattttgatatcagtatatgcaacctacataaaaacgcttatcacagaagcttatattcataaattttttcaataaaaaatataatcttataaaatttacattacacttaaacaaaagctagtaactagactagcttcaaatcaacaaatttcataataaaaaaacatacagaatacttcactttaaataaagtaatgtattctgtatgttttcaaatagtttttatctatcttgtatgtataaatcccaggcttcatcaaatatagacatactttctagcattccgctcaactctaagtatgaactaatttcatcatagtcttcagattgcttcggaaaacttaaatcatcatacatcgcctctgctaaatctgaaatttcatttctaaataaagctgcacgatgcttcatcatataatggtaaaatgtctttttcaaaaatattccctacctttctaacttgggtacattatacaaggcaaaaaagaaaaaaaccagcataaaagctggttaaaagtcgaaataatttctttttaatagacgcggtcttcccattaattcttcatatgttagttgttttggtaaatctttcgtgtaaattaagaataattgatcttcaatttcttttactgtatggtctgattgatagtccatcccacacgaggaacaagaaatacatggtgtctcttggatttcaatggctttcgtaccatctggtaattcccaatatacagtattcaagctttctttcgcttctgtactgtcacaccacatacaattcatactgcatcaccctcagtttttttgtcgttttcttctaacttagccatttgtgcttgatattttttatcttttaattgatcgcgcttatcacgtttatcttttaaagatgcatgagtatcattatcttcgtagtctttacgacggttcatacgctgtaagtcgtctggaacgaggttaaatttcttatcgctcataagacctgcgataccaacatctgaacgtttttcttcgtagttcggataaatctctttaaagtatccttccgctcttcctggaatatagctctctggctctggatacgtcgtaataacaccttcaaagttacgaagtacaactttatctgcactttgtgagattaaatagtttggttgaagtgcaattttaccgcctccgcctggcgcatcaacaacgaatgtcggaacagcataaccagatgtgtgtccacgtaaaccttcaataatttcaagacctttagatactggtgcacggaagtgaccgataccttcagataagtcacattgataaatgtagtatggacgtacacggatttttactaagtcatgcataagttttttcataattggaacgctgtcgttaataccagctaaaattactgcttggtttccgactggaacaccagcattcgctaacatttcacatgcctttttcgattcttcagtaatttcaatagatgtattgaaatgtgtatttaaccatactggatggtattttttaataatgttacataagttttctgtaatacgttgtgggaatactactggtgctctcgttccgatacgaataatctcaacatgcggaacctctcgtaaattttttaatacatattctaaaattttatcattaattagaagtccgtcaccaccggagattaatacatctcgtacttgtggcgtttcacgaatataagcaattgcatcatctaattgtttctttggtacacccattccaatttgtccactaaaacgacgacgtgtacagtaacgacaatacatagaacattgatttgttactaagaatagtacacggtccggataacgatgtgttagccctggaactggtgaatcttcgtcttcgtgaagtgggtcttctaaatcatattttgttttatataactcttccgaaatcggtactgattgcatccgaatcggacagcgtggatcatcaggattcattagccaagcatagtacggtgtaatgtttaacgggatcgttttcgttgaaattttaacgccttcttcttcttcaggtgttaagttaatcacttttcttaagtcatctaacgttttgatcgtattcgttaattgccaaacccaatcattccattgctcttcagtaacatctttccataattcgatatccttccagtgacgatttggtttgtatacatcatgtaacattgctattccccctttttatacgctcatcctttatataagcaatagttatgccaactttacattgttgataagtaaatgtgcggagaaccctattacataagcgaaaaaatatttttaagcgttgtatgaaatcaatacttaacatcatattcattactttttatatatgtaaacgctcttttattggtgcaaacacacaaaaaccgccgattattcggcggttttgtcgtacttgctcagtttatattgaagcgtttgacgagggatacccaacatttttgcggcttgtaatatattcccttccgtttcaatcaacgcttgatctattaattctttttctgtttgatgaagtgcttctctaagtggcattatacccttcttcttcgaaaacttctctttccgaaatgtacgtggtaaacaattggctgtcaatgtattcccttctgcaataataacagcatgttcaatcgtatgttttaactcccggacatttccaggccactgataagcttgcagtctatctttcgcttcctcatcaatttgaagtacaacttttttataacttttattatattctttcaaaaaataagatgctaataatagtacatcctcagttctttcacgaagcggtgggatatataatgaaaatacgtttaagcgataatataaatcagtgcgaattttattctctcgtaaacatatttctggaggctggttcattgcggtaataacacgaacatctacttttctcgtcttattatcaccaattcttctaatgactccatcttctaacactcgtaacatttttgcctgcaaatcaagaggcattgaattcagttcatctaaaaataatgtaccaccatcaacaagttcaaatagcccagctctttcaatcgctcccgtatagcttccttttgtcgttccaaacaataaactttctaatagcgactctggtaaagctgcacagttttgtgcaataaatggcttgttttttcttttagaagcttcatgaattgcttgtacgaacagttcttttcctgttcctgtttcaccatatattaaaacattcgcgtctgttggtgctactttttgtgctaactctttcgtctgtttaaaccgcgtatcatttgtcactatcgtctcaaatgcagcgtgctttttaatcactttttttctagatgatcgctttattttcgactgtaagtcaacaattgtgtcagtaagtttttgaattgtagagtaatcctttgcaatttcaacagccccagcaatattcccatctataaaaataggtaacgtcgtatttactgtacaaacatcttcaccatttaaattttgataatgttgtacctgatgtacgataggtttttttgtatctagtactttcatcaatgtactcgtttcccttgataaagacgggaacgcttctaacagatgtttccctaacactttttcaatcttggatccatcgtgttttgcagctacagaattataaaatattgtaattccattttcatctacagcgtgtatagcctcatcaatactgcccaaaatcgcttcaatgacttcttgtgtcgaaactgctagcaatgtcatcccccctcttgccgaaaatccagcaattatatgccgaattttcggcacacctatgtgcgattgtaagcatgacgattccgttctataattttgaccaattttatattttcattagataactcgaaactctaattagtacaactttttcgaacacccagctccacctaactgttttgctttacagccaaattttgagacggaagttttactgctttcgaataactagatagatctttcacccatatattcatatcttccaacttatcgaaaatgtagcaattattcgccagtcttcctgtatacgtatagcctaattgatgaaaggcagcattcattccgaaagaaagcgatcgagcaattgtataggagcagaaaatagatctttctcgaagctcttcctctaatttaattagtaaacttttcataaatccatgtttacgatattcaggtaaagtagcacaattcgttaattctgcatttccttcctttatgttcatttctgcagatgctgtactaataatttccccctcaaattcatacacgtagtaaattgtatcgtcttctttcatcgtctgtaatacataacttgcttcatttaaaggtgtcggatacacttcaaatacttttccgaagacagttgctaattcttctgcatcttcttcagtcgcttttctcagcaaaaatttctctggaactactttttcttttatttcttttccttttacaccgcttaatatagtatcttcctcagtccaatgcatactatttcgtctttcatcattattatatttcacaaaaaagtatgcatcgtgtccttgaaaataatgaggtatcgttgcttccaacacaaaaccgaaagagagccatgttgaaacatgctctccctttcctttaataatacatttagtgaaagaatgtttctctgctagttcgtcaattgtctgtataatactttcaacatttcctgtatagtgatctacccggatacgtttattaaaataatctaaaacgccttctactgtataacaattcgtctgttctctaaaagattcatagtatttcattttttcacctcacaccaatctagtaatgtacatgcaataatttttgcggcagctatcattttatcaacttctatatattcgtttggatagtgtgctactttcgtctctcctggaccaaatactattgttggtacgtttgcaatttgtgtaaataaacctccatcagtcccccacggagatgcttcaataattggttcgttcccttcgatttcaacaaagttatgatgaagtgttgtaatgagttcatgattttcttctaattcaccaggaacccatctcgctccaaaccattctacttctaccggattttcaacaaaccaattgtccacatcatttaattcaacaatccaattctcaaactcttcttttgccgcctctatagtctcattcggcgcaacaccgcatcttccttctaaaattaattcatcgggaacagaacttggccaactccctccttcaattttgccaatgttaattggaattggaattggaattcctttaaataacggatctgtaattcgactatttcttttctcctctagctttcttacatgttctataacaaacatgcttttttcaattgcactaaccccttcatagcgcgttccaccgtgtgcagctttcccttttacacgtagacgaaaccacatggaaccttgttgtttcgggaaaaacttcatattagtaggctctggaataatgacaccatctgctttatatcctcgtaatatagttgctaatgtccctgctccaccactttcctcttctattacactttgaaaatagatgtctccttttaattcaatactagattcaatgatcgcttccatcgcaagcataagtgcgacatttccgcccttcatatccgtcgttccacggccatatatacgatttcctattttctcaccgctataagggtgatgttcccactgattcacatccccttctggaactacatcaatatgcccatttaatatcatagatttcccgtcgccacttccttttaaagttgctacaatatttgggctatctgaaaaacttgtacggggtgatacaaaataaggatgatctttcattttagaaaaggagggctcccatatatcgagatctaaacctaattcacgtaatttttcaatcacaattgcctgcgcaccgctttcatcaccagatacgctcttttcttgaattaatcgttttaaaaatttcacactttcctcttcatggctctcaatataatcacaaacttgcttttttaattgctccatatattacatctcccttcattcaattactagtaagttagaactaatttgaaaatcagcttctgtatgtcgttttacatcttctactgtgtatgggctcattaattcttgtaatataagtccactcggagttacctccatgactgccatatcagtaataattaaatctacacatttctttgaagttaatggcaatgtacactctgaaacaatttttgcatttccgtacttatcaacatgattcatcacaacaacgacccgcttcgctttttgtgctaaatccattgctccaccaatacctggaacacgttttccaggtacaatccagtttgctaaatcgccattttcacttacttgtaatgaaccaagaatcgttatgtctagcaaaccttttcgaatcatcccaaacgctgtgcagctatcgaaataactcgctcctgttataagagaagttggtaaacctgctgcattacacaaattttcgtcttcattccctttacttggcgttggtcccatgcccacgattccattttccgcatgaaacataacatttatatcgtcaggcaaatgatttggtacaagcgatggtatgccaatacctaaatttacaatcataccattttgtatttctttcgccgcacgcctagcaatcttatccctcacttctacgcccatacccatttccagttcactccttccgacggtacaatataatttacgaaaacacctggaacgacaatttcctctggatctaaacttccaagcgggactatttcttccgcttctacaattgttatatccccagccatcgctacgtgaggattcatatttcgtgcacttttgtcaaatacaaggttaccaaacggatctgccttttttgcatatacaattgaaacttcagcagttaatgctgtttcaactaagtaggtcttaccattcatttcaactgttcgttttccctcttccacaatcgtatcaacaccaacatcaactaaaacaccaccaagaccaacgccaccagcgcgaatgcgctctgctaatgttccctgcggagaaaactcaatttgtaatcttccctcgtttagttgccttcctgcatttggattggagccaatgtgagaagtaattattgatttaactctttcatttgtaacaagacgaccgatacctacatcaggaaatccagtgtcatttccaattaaatttaaatttgtaacgcctttttctaaaattgcctgtattaaagatggaggggatccaatccctccaaatcccccaaacatcaatgtcatatcatcatggaacaaagaaattacttcctcaatttcttttaatttaccgaatgtatttgtaatagttgtcatgcgatactatgccctcctttttgcatcatctcttccacacttttagagaaaattgaaagtaattcatctaactcggaatatgtagttgtcattggcggtgctacaagcagtgcactatcttcttttcctgcttgccctgaaactgcttggtataaaagcagaccatttttagctgcaactgaaataagctctgacgcttttgtaaacggttgcaattctactccgattagcaacccttttccgcgcacatcagcaatgattgtcgattgttgctgaactttctgtaagccttttattaaatactctcccttttctgctgttttttcaggaagattatgtttctccatatattcaataacagctaaagccgttgctgcagacaatggatttgcacttaacgtatgaccgctcattactgaacgtgatccacgtaatattggttccataacacgatcacttacaactgtcgctgccatcggtgtatatcccgctcctaaccctttaccaagtgtcataatatccggctctacgccccaatgctccatcgcaaaccatgctccagtacgaccaagcccagtcattacttcatccgcaataaataaaatatcgtaatggtcgcaaatctctttaatgactttataatagtctttcggcggaacaaccgcgcctccagctgctccgataatcggctcagcaataaaagcagcaatatgctctgcaccaattctttcaattgatctttctagttcagtcgcacatgccagctgacaagttggatataccttttgaacaggacatctgaaacaatatggagctggtatagtcggataatcttccaaaatagatacgaaacgttgtctacgtagtggatgcccagacattgataaagcacccatcgtaataccgtgataactcatccatcttgataaaattttatgtttcccttgaatacctcgctcttgaaaatgctgaattgcaattttcatagctgtttcattcgcttccgtaccactatttacaaaaaaactccagttcaaatctcctacacttaaatcacttaacttcttcgctaatttttcagctggttcactcgtaaactgtgatctataaacgaaagcaatctcctcagcttgctttttaataacgtctgcaatctcctttacgccatgcccaatacctgccgtaattgctcctgacgaaccatcaaaatatttattgccattttgatcatacaaataaacaccttttccatgtgaaatcattggatacggctgaccaacaagtggtttaattaagtaatcgcgcatagcgctcccccatttctccaatttgtatatatatatgaagaaaattgacgtttctttcataaaaaagaatcctctgcaaaagcagtgaatttatcaaaaaactattataaaatatacaaatgagtgcttaaaaaattttataaaacagaaaattcagaactaaaaaaccgaagaccaacccttttctatacgcccaaatgaccctcctttttatatgaaatgactgcatcaccaaatgtttttatagcataatgccagctgtccttaaataccgacattctgtacacttcgacggaactcccgttaaactccttcctattatcctactttaaattgcatattttaaaacaaatttcgacacccaccttactaatcaattcagattcctattcattatgtaaacttttcatttttaaactataaaaaaagaaccgattaaccacactaatcagttcgtcatgacgctctcttatgggttaatactgtcaattgctaaaataaatagaaaaatgaagtttacaaattcatcctacagtctataacacaaaaccttttcataacttcattcacaattactatcgggatatccctatcccgaagtggcactcctttcctcagattcaaagtatctttcctttataatttatgtaggacaattatcactttgtatgtgtatttgcctataattaaaaaaatccctagttttctagcgatttttggacatgtattcaatatgttaattgaaatgcactttcaatttggcatttattttactttcgtacagtcatatgtactgctttactctgtgaaattctcgtaagcaccagcacctctttatgaaaacatatttgttgtcactttttaattttccctttataaaatcattttttttgcataaccgctttcttgcttcgcatatagttttaatgatgacaaaggaggaatgttcatgtctcaatctgaaatcgaaaaatatggacaagaagttacgcaatacgaacagctcgcacgttactatcagtttcgtaaccctaaaaaatatatagaattatatatgaaatattacgatgcactatcaaaacttgtacaggcgtatgaaacaagagactcacaagaagctgctttaccatcacatataagaatttttcatgccgatccaaatataccggcggttgacattttagtaaacggacaaaaggttattaaaaatatttcatttaagcaattcagcccttatttatcattagtgcaaggtaaataccgtatagatattgttcctgtcggaaatgaaactccaatcttttcagcgttggtaccaataatgggaaatcatacttatactcttgctgcaataaatagtgataatcacctacaattacaacctatacttgataatacacatttaccagctggtcaagcaaaaatacgctttgcacatttctctccagatacccctgttgtaaatgtagatttaaaagatggagatcatttatttgaaaatgcactctttaaacaaataaccgattttttgcaagttagccctggtacagcagatattgaaatttcactcgcagataataaaaacgttttattgactataccgaaattcaatgttgaaccaaatgttatttatacaatttcaatagtaggttattcaactaaagatcctaaattagaagccgttatactcacaaattaaaacagtctacaccattcatttggtgtagactgtttatttttgaaatgcaatttgaaattctgtccaatcgttatctgatcgacacataatggatccattatgtttttccacaatttgtttacatacaaacaatccaataccagttcctaactttttagtagttacaaatggttcaaaaatcgtttctacattttcagctggaatcattggtccattattttttatcacaattcgaatagcttgatcttcttcaaatacatcaatgataatttttcgttcttctttcattgattcaagagcatcaattgaattcattaatatgtttaaaaatacttgtctcacttcactccgataaccaacaagcggaattggatacggtaaattcttttcaatcaaaacattcgcattgaccaaactcggatataagaattgtataatgtcttgaaacaagtcattaagccaaaaccgttccgattcattccacatttctttttttgatacgagtaaaaattgcgaaatacgaaaatttaattgatctaattcatgcgaaataatatctaaatacgataaactcggatgatctgcctttaataatttgacaaaccccataatggaagtaagcggattacgaaattcatgtacaaaactagctgacatttgtcctaaaatcgtcagtctttctttatgtgtttcgttaatatattgctgtttttcctctaaattcttcgatataatttccgagtattttaaaacggtataataaattaatttgtcaaaacaagtatgtatttttgccataattggtttcaattcacgagcgctaacatctaattcacacatcgcttcgaaaagttcatttcttcccacgtttgcgttataaacaaaatctccaatattcgcatctgctccagcacgttcaatagcaattttctcacataacggttgaagataatttatatctttatcttccatagtaagttcgataattaactctagtaaatcctctccattttgaactacttctagtttaaatggatctttttcggaaattatcattttgtttttccagttctctacgaattggtgcctattgtttttcaagtgtgaacaaaatatttctttaatatccttatcgattggaaaaacctccattccctccatttccatacgacgaataccctttatattttgaatattaacacaaaaaatacgattcgttaatagatttttgtcacattttgttaatttctgttgataaaattattttttctttcttatttaactaattgtatgcaaatcccctttttccttcacatattttcattatttccgtagtcaaaacgactttttttgcatcatttttaattcttgcgtacaatagaaaatgaaaggtgtgaaaaatatggtaaataaaaatgtggaagattatctccaagaaggcatttacggccaaaagcaaaacaaaccagaagaacgtaatatgtatttaactacattacgtgagcgtgtggaaatcgctttaacgatcggtcaagtaatgcaaagtaatgtatactctgaagtggcgggtagcatgcgcccttctcaatcattacaactcctcctaaatggtggcattgcttacccacatttatcaaaatacattaaattagcaaacgaaaaaaatgttccttttacaattgttcaaaataaagatacaaaaacaccaatcggtttagtattaactcatgctactgctgtagataaagaacaaatttatgtagaagatactattttcaaacaagaaatgaagtaaaagttacacttaattaaatagttactagaagcgtaaaaaacgagtatggaatcgtaaacatttcctactcgttttttagtgcaagttttaagtttttctactttattttttaatacatactaatttcatttctgtcatttcttctattgcatatttaattccttcacgccccgtgccactttctttcacgccaccataaggcatatgatctactctgaacgttggaatatcattaatcatgacaccaccaacctctagctcatcaattgcacgcattgctttaaataaattatttgtaaatactcctgcctgtaagccgtaacgcgaattatttacttgctcaatcgcttcatcaaattctttaaatgtatttactgtcatgagtggaccgaatacttcttggcactgcacagatacatgatttggaacattttttaatacagtcggttcaaaaattcgtgcatcccgcttcttaccaccgcataaaacagttgctccttccttaattgcttcttgaacccacatatcaattcgctctacatctctttttgaaattaaagctgatacatccgtttcctcaagcagtggatcaccaacaacaactgattccatcgctttctttagcttcgaaagaaattcatgcattttcgtttcatgtacaaaaacacgttgtactgaaatacaaacttgtccattattaacaaatgctccccattttacacgttcaattatttcatctgttaactctacatcttcatcaatgataacagcagcatttgagcctagttctaacgtaactcgttttagcccagccttttgttttattccgattccaacttttggacttccggtaaaagtaatagaagcaacgtaatcatttttgacgattgcctcaccaaccgtggagccaggaccagaaatgatatttaaagctccatttggcaatcctgcctcttcaaataactcaactaatgcataagatgataatggcgtttgatcagctggctttaatacaactgtatttccggcagcgattgctggtccaactttatgcgctactaaatttaatgggaaattaaatggtgtaatagcccctataaccccaatcggctttcggattgtatatgcaatacgcccatctgcaccaggtgcggcgtctaatggcaatgtctcaccatatatacgcttcgcttcttcagctgcaaatttgtatgtttgaacagtacgatctacttctccccttgcagcacgtattggttttgcagcttcttttgcaataatctctgcaaattcttctcttctttcatccattttttgtgcaactttctctaaaatagtcgcacgatcatatgcagataatgtattcatttttgtcattgcattttttgcagcggtaacagcctcttttacatcttcttccgtgccttgtgcaatttccgctaatgtttcttcagaatatggtgcatataatggtttatacgtgtttacagatttccaatctccatttatatataaatgctttttcatacttcttctccttccaaatatatgtatacaacaatacttcacctagtgaaaggtttgacttatgtcattgtatcatagcccttatccctcaaaaaacattatgctcaaaaaaactctgctatatagcagagtttacgagctaatttgctcttgtaacgaaatttgtttttcatcttctaaaataacaatcgattctactatctttgtaacttctaatctttttatataatgtccatctaattctttcacacaaaacttataattttcaatttcaatggaatcctcttcagcaatctctatattcttcgttaaaatccaaccaccgattgtatcaacaccatcatcatcaatccctaaaccaaataacatattcacttcactaacaagtacttttccctctagtatcgtcttcgtttcactaaccttttgaatttctggctgctcatccgtatcaaactcatcctgaatatctccaacaatttcttccagaatatcttcaacagtaacaagtccagatgttccaccatattcatctatcaatatagcaatatgtgttctttctttttgcatttttaaaaacaaatcatgaattggaatagaatcgataactaaaataattggtctcatatattgctctactgtcttcttattaacagctttatgttgtacaaattcagtaaaaatatctttaaaattcacaaaacctattacgtggtctttgtcgccatcaacaactggataccttgtatatttttcacgagacattttttgcaaagcttcttcagcaggcatctctttacttataatattcatttcagttcgaggtaccattatttcttttgcaatgcgatcatcaaattcaaaaattttattcacatatttatattcagattgattaatctcaccatttttataactttctgaaactaacaaccgtaattcttcttctgaatgaacctcatcatgtcccttcggcggtttcagccctagcagcttcgtaatgattcgagctgaaccatttaatagccaaatgaatgggaatgcaatacgataaaagaaaattaacggcttagaaacaagtaaactcacttgttcagatttttgaattgcaaatgtttttggggccaattcacctattacaacatgtaaaaaagtaattaacaaaaacactaaaattacagcaaaaatgtctgctagttgagtagagatattccaatttgcaaaaagcgtatcaaacatttgctttaacgcaggtttaccaaaccacccaattcctaaagctgtaacagtaattcccagctgacaagcagataaatattcgtctaagtttgtaatgactgttttgaccgatgttgcacgattatttccttctgcaattaaatagtcaattcgtgaacttctcactttaacaattgcaaattctgctgcaacgaaaaatgccgttaaagcaattaaaacaatcactatacttatactatatatgtccaaatacttttccttacttactttgtaagcaaggaagccacctcctacttaattttattcaagtgaagtaagcattctaatactctaacaaaattctacattagcaaccacctttttatatattatatgcatacataaaaaagatatttatcattatgataatctaattcatttacaatcgtcaaattattctaaatgttacgataaaacatttttatttaaacgaactattcttctcaactcaatttcgtgaaaaaacactttctttgccgattccacacttcttttgtcgcactagaagggaacttacttcatagctcgaaatcattcaacaggatatatataggagggattattttggaatataaaacaccatttatcgcaaagaaattaggtgttagcccaaaggctgttgtccggatcgcacaacaattaaatcttacgatagagaaaaacaaatatggccactttattttcacacaagaggatgtcgatcaaatgttagaacaccatcgatttcaaatagagcaatctcaaaattctcaatctactcaaaaggcttcctcaaatgaagttgaggaattaaaaactcaagttaatacaattgttcaaaacatattacccaatgattttgagcaattagctgatcaattaaacactattacgagaagacttgatcgaatggaagaacaaatgcaagataaggcaaatgatgtcgtcacgtaccaacttttacaacaccgtcgtgaaatggaggaaatgttagagcgaattcaaaaattagaagctgccctaacgaaagaagaacccatttatattactcctgattcaaaaccaacatatgaacgagaaaagaaaccgaagcgccgcaaaatgatttttagtatatttggattataatttttagacccttattaaaataataagggtcttttttaatgaagagttatatcctatacaaatattattctctttattatacatattcacttcgctttatttcgttaacataatatttttactgtattctgcaattaatgcctgtgcatgagcattcccttgaatcacatcacgaaattcttttaaagaatacaaatgcgtaaccccttttcgagcatgaattcttactggtacaccttgtaaagtatcatgaaactgaaatggattatctattggctcaattggaaaaccaagtgtaagtaaatacatatacattctttttgttactgctgcaatgtaccattcagcttttgtttctaacgcatgtataaataaaatagctgttagccttttgaaatgtcctctcccacgagacgttttcgaaatacttaacttgcctatttcatatacattcttcaaatcttttactaaatcatttttagaaaacggatagaaaaactcagaatttgattgttcaggtatcgtatacttaatacattctactgtaccaataggatgttcatcttctattaataaaaatcgtgatggatttaaattacgttctacgaacattaagtttctttcttcacaaaaatctccccatagttgctcgaacccaaaatgttcttcctttgtttgaacacgctggaacatatttaaccgcctttcccatcgtcgctctgtttttgataacgctttcactatctatcatataagaacaaatcttcgtatgcaactaaaaatatttatgacttattatattctgcaaaatgaattagattccaatttaatcgacttttatcccgcgctcacattccttttaataacacatttgtagcacttttcaaatctaaattacattatgtttctttccatacagcatataattcttcttaatctaaagaaatcctttatgaaaaaggatttcttttacttcttaatgctttttaaccatttttcaaaaatttgtatcatcccatgttttccagctaatttctcttccccttgtttcgtcttatatggatataactgcaagaaaacaccgcatccagactcaatttttttactatgcatatggcttcctggatatacacaaatgacttcataaattgaccttcgataatagactcgctttccatcctgttcttctacatactttatagaccagtacttatacatttgctcagttgctttcgtatttccgacgtgctgaaaaatattgtacattggactatacttcacttcaataataatagaagatttatatacgtatttcccatcttcttttacataacagtctaagcgaatatctggcttcttcgtatcctcaccattgtaaaaattactacctttacttaatgcaataagaggatgtgtttcaattaagtcattaaatgcaacatgcacctttatatcatctcgttctaaaactactgtcgttccatcttgtaatccatctacataaaaatgttcttgtatttgttcacggatagagtttctagcttcaaaaccaatttgctctaaaattgaaataacgataaaaaaagcgtaatattcatacactaaaaacgttggcttataaacaaataataacgatggagattgatccgtatattgcgggagtacttctaaatgatgtagtaattgttgatgtggtatcggtaaatcatgtaagttcatgttacttgtttcagtaacttccctccaaaacgaagaatgcattaacatttgaaagtattgtacattttcatgcacaatatgcgccaatattttatattcttgtattttcattgagctctttcgtaaatcggcttcttttagtaaatgtatatttttatatttttgcttctctctatcagttaccgatccattacgctcaattgtttgtataatcgtttttacggcttgaaactcttctgattttttctttttttctctttctaagatttcaattgtttgacgtaaaaaactttttgcttcaattaaataatgataaaattgcatcgctttatatttaagaaatgcattttccttactatttttttgttccataaacttacgattataatatttggcataaggttttcgttctgctactatagttccttttcttgttggccttcgctcttttccttcccatttatattcatttataaattttgagcttgattctattttcttaaagatttgctttatcattttcattttttggggtaactttctaagtaacactaaataagaagaatcctcaatatcgctaagtgcagagaaggtctttttatagtaacctctatccaaaatcaactcatttaaaattgacttcacatagtcttgaatcatttcaaattgatcatcaaaaaagtttttcggtacgatttgaaatgcgccataatacgttgtatcttctatacgcacttcaaaatggtataaaccacagcgccatggataaaagaattctgttttcccatgttcatatattaatactctttgttttttttcatttatttcatattgagcctcttttatatttttctgtccctcatatactttattccatataaaagtaatattcattggaatttcataattgtactgcaatcttattggttttaattcttgtactttataaatacattgaactaatgctgtagtagatgtacaaagacgatttaataaaatataatctcctttcccctcatttccaatgattaactttaatacaaaagggagcgtttcattcgtatcaacgatttttgtttcgtaacgcccttcattttgcatatccatacagctccagttctctacgtttttctcgtatatatgctaaagagtgttcaaatgtagatactctgtttgcaagtgcagattgcaaaagaggtactaaggtcgcccccctttttgcttcttcagaaagtaaaggcccaaccatcatttcggtccctctgattttcgtcaatacacgctgctttatttgtaaatcaaacccctcttctctactgatcatataggtatggttattttggaacggtatgttttgcaaataagtcgcaattgcatttgcacatcggaaagaaattcccttagacgcgtcatgtgatgacaatacgacatgcaacttatctaatagctctaattcttcttcagaaaacacttcaatcatcgctttatttctcatccaatttatccgaaattctcccgctgttactttcaaaggtggatgtaatacgactttcccctgttccatgtccatctcacaaaacggaattttctgtaacgttattaggttcgttcgatctaataatcgatcagagagctcttttgttgtttcatcaaaattcacagtacctacaaatataatattttctccaatttcaattgttgatggaattgaattctctatgtcctgtacaccctcatacaagtttaaaatacgattttttgtttcaagttcaagaacagatagaaacggagtaaaccaatgctcaatatgagacatgttcatttcatcaaaaacgattatatacagttgatttggattttctttcgccttcattaacgtcctaactaacttcgtttcactttcaataaaagtaccatttggatgaaggtaaccaagtaaatcatgtggttcttgatacgatggcgaaatcggaatccaaaccaactcttccccatactgtaaccctaatgcttctgcataagtttgcacaaaacgtgatttcccaatgcccggtataccaccaagaatcgttaacatatttgtttttacacttatatgaaaattataaatatccgtttcatccaaatataaccctttattatgcaccatactttgtacatactgtaaaaaagacgattcacgctcatcccattcccattcatctttttgtacttttatatcctctacttcaactagcttaccttcttcatgcattcgtttttttaattgctcatacacataatcacttacaaaatataattgatcttctaccgctatttctacatacttcggccagtcactgcagtttatatatttacattcacgtttctgttcaaaataggcgattgagctaattgatgactttagggatatgtttccgtaaagtcttccatcgtgccacaataattcgggaggctcaaagtctttcggaaattttggcataagaaatgataaataaccgttgctaagttttcgttctaaagattctctttttttattatttgtaactttaggtgccggaatcattttatagctgcttgctatttctttcggttcttctgtacatattaactccacgtatacatttcctctttcataataaagacgaaacattactagttgcttttctaatttcctcttctttaattccgaaaagattttttcattctttttattgctacataacccttcaaatacatatggttcatttgtaaattgttcctgtaaagtgaatggtattggcgataagcattgtacaaagaaattctctccactcttctctttctcagcttttgtaaatttccctaaaaatctcatatagtacattcgttttataaaacttggctgaagagctttatgtaatttcaccttagtcaccttcttttttcatactattcttagtgtatgaaagaaacgaaaaactagaaataaaaaacctgacgttatccgccaggttcaaaataaaaacttatattaatgagaaggaaatgcttttttctcctgtaaaattgcattatgagcaattttcattttcgcaagtacgtaacgtaatcgatcttcagcgttttcatctttacttatttgtaattccgccaaattttcaacagaacttgctaaattttcaatgactcctcttagttcaggatgatgattaaaaaaagattcttgcactaatactttccttaactcactagctaaatcaattattctagacaactgttctttttcttccattctcatccctcctgaatatcttatgtagtaaatattctctaaacaaagaaaaaagccctttaaatgaaaaggactttttacatttttatatttccagttaataacatatatattgatgtgatagccgcaacaataattgcccacatcacatacttctctacacctacaaagcaacggttcccttgttcttttcttgcaaatgtgtaaacaataattccaattccatacacaattgaaacgagtagtaaattctttaaaccagctgcataaagaagccatacagagtaaatagaagcaattaaagctaacgctccgttttttaatttagcgtcttttagctcgtttgtaatgactaatttaaattggaataacgctgataataaatatggtaataaaattgatgttgaggcaatgaaatacataatttgatatgttgattccgaaaacaaaacgatgataaatatagtttgggcaacaccatttgaaatccataatgccatgtgcggtgtttgctttttatttgttttcgtaaagactttcggaaatacgccatcttttcctgccacatgagaaatttcagaaacaagtaaaaaccaaccaattaatgtaccgacaagtgaagcaactaatccgatgttaatcgcaactgcaccccatggaccaacaacgtgctctaatacatgccccattgaaggggtttctaacacagaaagttcgcctcttgtcatagctcccattgacaggacagaaattaaaatataaatggacattactaaaataagtcccaatactgttgcctttccaacatctcgactattcttcgctcttccagataatacaactgctccttcaactccaatgaaaacccaaagtgttacaagcattgtatttttcacttgaccaagtatagcggaaagtgagatcgttccttccccccaaaaatcatgtgtaaatgtgtcccagcgaaaggctgttaccattacaacaataaataaaacgattggaactaacttccctattgttgcgatcacattcataatagaagcttcacgaattccaaataaaattaaaaaatgaagtgtccataataaaagtgatgccccaacgatagacgcaacattatttcctcctttgaaaattggaaagaaataacctaatgtactaaacagtaacataattgttgcgacattacctaagattcctgctagccaatatccccaagcactattaaatccaatatattcaccgaaaccagcacgtgcataactataaattccaccttcaagttccggtttttgtcttgctaacgtttgatatacgagcgcaagtggaatcattcccatcgctgtaatacaccagccaattattattgcaccactgtttgctcctactgctaaatcatgcggtaaactaaaaacaccgccaccaaccattgttccaactactaatgcgattaatggaaaaaatcctaacttcttttctatttgtaccaccccatctgtcattctaggtgttatgttcgttcaactattaaagtcacctttttctctaatagacgtttctcttatattttttcaggaaaacattacttattctaaaagaaaatgagcaaaaatggaatacttttttgaaaaaatgtataagtatgcacaaaaaaaccgctcattttgtaatgaacggccatttcaaacatataaatttgtatatttcttgtaaatttaacgaagtaacttctctttttgtaaaaattgttttgcgacttcttcactacttttaccatttacgttaacttcataattcatttttcgcatttcttcatctgtaatctttccagataatttatttaataccttttcaagttcaggatatttctgtaacgtttcttttcttaataatggtgctccttgataaggtgggaataaccctttatcatcttttagcactttcagtccgtattgctccaattcactatctgttgaatatgcatcaattacgttaacatctccagattcaattgcgctataacgcagcttcggctccatcgttttaacattcgagaacttatagttatataatttttgcattcctttataaccatcttcacgatcagcaaattccaatgtaaatcctactttggcttcctgcgcaacattccctaaatcagaaattgtatttatattcttttgatctgctatttttttcggcatagctagtgcatatgtattgttatactccattggcttcaacataatcatattatatttcttttccattccaatgcgagcctgctcatatacttcatcacgatttgtactctttggttcttctttcacgaaagtagataaagctgttcctgaaaattctgggtatatatctacttctcctgatttcaacgcttcaaatacaaatgctgttttcccaagacctggttttaattgtacgtgtaaatctgtatcttgttcaataagctgcttatacatttgaattaaaatttcaggttctgatccaagtttgcccgcaataacaatatctttcttttctgtactccaaagaaatggagaagcaatcattatacaaacaatacatatcgtcaatataacacgcttagaagagcgtttcggtcgttcaagtatgcgaagtactatatcaaagaataaagcgagtaacgcggctggtacggcccctaaaatgataagcgcatgatcatttcgatctatacctaatagtataagcttaccgagcccacctgcaccaatgagagctgctaatgtagccgttccaacaattaataccatcgctgtacgaataccagccataatgataggcaatgcaagaggaagttctaccttccacaatcttctccaactattcatccccatagctttcgcggcttctattaaagattcatctaattcccttattcctgtatatgtatttcgtaaaataggtaatagtgcatacacaactaatgcgataatcgctggaagttttccgattcctactaatggaattaatagtccgagtaatgcaagtgatggcactgtctgcattactgcagaagttcctattataaattcagccattcgttcttttcttgttaataagatgccaagtggcaccgctataattactgcaaaaaataatgaaataagcgatatttgtaaatgctcacttaatgcagttagtaattctatttttcgttcttggaacgtttgtataaaattagtcactgtttagcctctttccttcatttgttcaacaatgtaattgacaatgtgacgacttgttaacgctccaatatattgaccgtttttttcaactggaacgacctcctcatcacgcacacgaactaacgcttcttgtaaagaagaatgtaatgatagcgcctgcccttctaattgcacactttgatcaagtggcaatacatctgctatacttttcccctcataccaagttcgcccacgatttccaatgaattcctctacaaattcatttttcggattatgtataattccttctggtgtatctagttgaacaacttttccttctttcataatacaaatgcgatctccaagtgataatgcttcttgcatatcatgtgttacgaatacgattgttttttgaatctttttttgcaactgtacaatatccttctgaagctgttccctacttaatggatctaacgcactaaatggttcatccataagaatgattttcgggtttgcagctaatgctcgcacgacaccgacacgttgtttttgtcctcctgacaattcatcaggcatacgatttcgataaatatccggatctaatccaaccatatgtaacaagtcatcgacgcgtgctttaatttcttttttgctccattgcctcatttcaggaacaactgcaatattttcagcaattgtcatatgaggaaacaaagcaatctgttgcaacacgtatcctatatcccaacgtaattcgtttatattatattgttgaatatcttttccatcgattaaaatcgatccttcagtcgtttcgattaaacgattaatcatcttcattgtcgttgttttcccgcaaccactcggaccgatgagaacaaaaaattctccctttttaatttctaaatgcaatgaatccactgctttcgtgccatcttcatacgattttgacacatgattaaattgaatcacaaatacaactcctttactgttgtttcctttattttgatggaatatggcattcatttcaaatgatacgcttttaaattaaaaaagagctcacatttgagctctaacggtcgaacaatattgttttcattatagcagcatattcgcgaacatacatttttctcttagaacgaattggtgtttcagcagctagtgcctccatcttcatgcctaaacgctttgcaattattttcgttcgatataaatgatacgtattacttacaactaccgcatgtttcacattatataaatccatactaaactttaagttttcatacgtatttgtagattgatcttctattaaaatacgactctcatctataccgtgtaccattaaatagtttctcatgctgtgagcttccggtatatcttcatcttctccttgaccacctgaaacaattactttcgcttcaggatgggaaaataaatactccaacgctacatccaaacgattttgaagagataaagacggtctatctccaaataactttgcacccagtataagaacgtacggagagtgatagctcaacttttcacgagcaactttgttcattctaaacgtcatataaatgatatatagtggcggtaataataaaatgataagaaagatccatttgttcataaataagtttgcactccctttctttttattatacagaaaaagaaagggcggcagaagtgttttttaaacgattgatttattagaaacattcgccgctactttacgttgtgatagtacataataaatagcgattcctaatgagaagatcaatatgcagcttaatacgtaaaatggaagcattactccggctttagatacacccgctgtaaacagcattaataatacaattcgtattccagtaccaattaggcgaaataagctgtctacacgtcccattacttcgtttggaatttcctccatcatcaatacatttctcgccactcttgtacccgcatttccaactgcttgaaaaattgcaagtccatataagaaaattacggaaggttcaataatcattgcggtaattgaaattacataaatggacatcgtcataacgattgaaacttctgtttttacatatttcattatgagtggaatacagattcctgcaacaaccgctccgacaccgtacatcatcccctctattgcgtatacagaggcattggctttaagtatatccgaaatataaactggtattaaataatttgccatcataacacctataaacggcatataagtggccagtaagaaccaaaagagcttaggacgttttttcataaagtgaattccttcaaacaattgcttcttaaatgttatttttcttttcacttcttttttctttacgtatggtatacataagaaaagaaaaaatgctccagcaaaagttaacatgtctactaacaaaatccacttcaaagatacaatttcaattaagaagctcgcggccgctccagaaataacttgtgttaactgtccttgtatttccatcgttccacttaaacttttataatgttctgcttgaaatatctcttggttgaacgcaaatattgtaggataaaataataaatagtagaatgatccggctatataaataagaatatagtgaatagaatgataaggttgcccagcaaatccccatataaccattattccgattacggctattccgattccttcgttacatagcaataaagattttcttgaaaaacgatcaatactttgcccaatgaatggtgttaataaaaacataatgagggttgcaatgatagaaacataaccaaatgttgtctctcctccactctctttaattaacagccaaggaatcgttatcataacaatcccggaaccaatagcagatagactattggctcctagaatgtaatacaagcgagaatcatgataaagtgaggacatatcattccactcctagttgttttttcacctctttatatacgctcatatatgctttcaattctttaactacatcatgaattaatggttttgcatcttccccaagttcaccatcttgcacatgtaatccatcaagcacaacttgttttggaattgcatttgcataaacacctctagcgaccgttcgcatgctgtttaatgcatttattccacctttaccgccaccagcaaccgctaacaacgcaactggtttatgaataaattcactactacttaagtaatctaaagagtttttcagcgcaccgctcatcgcattatgatattctggtgtacataatacaaccccatccgcagctttcactaacgtttttaatttttttactgcctctaaatcacgttgcgactcttctccattgtataaaggtaactcctcaattgctaaatcatataattccccttcaaattgatccgcaatatattttgccaccacgcgagttctaccaaattttcttggtgtaccgttaataacgactagtttcatgattatttctcccctttgttttcaagttctacttatatattatcagaaatttctatacaaaacacaatataaagagttaacttgtttcataaaatagtatgataaacaaaaaagaactcatactttcgtatgagtttcgtacaattactttgattcatctctcatgctcaatgtacctaaactttcatttgcttcaaaatgattatatgctttttccgctaatcttttccgttcttctggtaattctatatatttcattacgttttcaattattttttcgtacggagtaaatacaattcctggccactctacctcatcttctggattactattttcggaaataataaatttcttattcgcaactgcataagacacgcgaggtgtttcaagaattcctgataagtaaaaatgaatatttaatataattttagctctagcaatcaattcatttctaacaattccccacgcattatttttaaaaactatatttaaattcggggcaatcgcttttagatgatcaaaaatagcttgtcgcctcggattaagagcacctataaacagaatatcaatatcttcaataatctcatcttcaaacgcatctttttttatttccaaagttggagcatagttcatttctacatgttttatttcttttcctacccctttttgttgaagccattctatattttgtttactataatcccaaatcactctatcttttaataatattaaataaaggggatgcgcatatggacttccttcgtatagctgttctaaattataaataattgcatctttcggaagaagattcgggttatatgcgtatgtatgtgctccaaaaacaactgtattctttgcattttccagtattgtttctgatataattactgtatttccctcctgctccaaccgccactttaaagctcgcgcaacatctatgaaactaccgtatgtctttgggcatataaaaagacaataatcatattctttattcaaataaacttccattaatcttaaattatttttatataaatctacatctggatgtttaagtaccaactcatttgcatgttttcttgctactttatataatccagcataataagcagcgatgcatcttcttaattcgattctttcccggtcctcatctaatacatccatatttaaaagaagatttgcgatacaatacgcttttaaatgatcacgatcataataatagtctagtagtggcatcaattcttcatacgtatttccatgcaccgattctcctagttcaatcgcccatctcattaattccatgattactccactactcctttaaccgaaaatgtatttaataaaatttcgcattattctctactatatttgctatatgaaatggaatcttttcttttatcgattccaaatacttttgcgacaccgcccctaaatgttttttatgaggtatatagaaagcactaatagaaatttcatagtcaaataagtaatcatacacatgataatctacaaatagtagatcatcctttggaaaaggaatttccttcccttgcagagcatacatcaaagcaatattgttttgagatcgtaatcgatacaaccttgcaagttggtataatggttcagcccgggttggtctatattcccaagctttttgaaaataaaaaacagctaatgctaaatattgctcttcttgccctttaacagtttctttttcatcagcatctgtcacttcattttgtttatttgctgaacgatttgctaactgctcataacaaaatcctattcgcaataacgaatagaatacctcttcaacccatcctcctgcttccactcgttttttataccatttaattgaattctcaaattgacttaaatgaaaataagtctgagctaaataaaataaatatcttatatgcaaatctggcgttgtttctgggtcgtttattccttgtaacaacaacctctcatctctttcaaatttatcagctttgctcccgccatctccgggatcattcacgacaagagtctctaaccgagctaccctcgtattgtaattcgctccaacttttgaacgatctatatcccaatactcatgagtaacaccgacagatttccatggtaaagaagctttcaaaagacgtgtaagccaatatttaatatgaacatcatattgtaatgtaagataatgatcttccgttaagctcgttttatcgaaattcggatcaacctctaaaatcatatccgcatctaatattaataaataatctgcttctgggtatgttttttgcgctaacgaaacagctaagcttctgttataaccaaagtttttaaacggctcatgatgaaccgtcccaggtatctcattttccttacaccaattttcaataatttcaggcgtattatccgtcgatccagtatcacaaatagaaacaaagtctacaattgattttgttgcatttaaacatctttccataattctagactcatttttgacgatcatacaaagacataactttttttctttctttacagacttcacttgctcatttcccatttaaccacctcatattttattaacacgctcttctcatatgtaacaacatttcttagctatactgatgacataagcacccttttactatttatgaaaacttcattttatttattcttacttttatgttgagatatatttcatgcagcgctttatatttgatacaatcaatacaaaaaaacataatgcgggaatccgtacatttcaaagtctaagaggaggttatattttgttggattacatttggctagatgacaaatcaccaattttagaacaactaccaagcacctttaaatctgcagctatattgctacacccttttgtccaaatgcctttaggatgggaaaagtctgtgagaaaaagaccatatgagcacatctatcctagcgctgaagaaatcattcataatgggaaatccgtttcttggaaggaaatgatgtcttatagtggattacattcatacgcagaattagcaatggccctgttgacttccattggtgcttatacagaagaatataaaagagaggatttagccgaaaagctatattcaaacttaaaaaaagatctttattatccaacagaagattatacgtctatatttttattacataaattacttaaactcctcggttctaaaggtgcaaaaaatttatatttctctgaaccaattcttgatacaaacggattattagaggtaaataatactactccattagatatttgggacattagcaataatgagttaattattactggcgaagataatgagtatgcgtttatgagtatattcgattcctttacaaccttattattagctaaagaagaaaatatagaatatattgttcattcaatgaacgttgaagctgtcatttgtgacaaaaaaacgatgattgattggtatttttaaattagtaatttcttaaactataaaaaagaaacttgcgcttatgcacaagtttcttttcaaaaacatccttattttttcacaacttcatgtccaccgaactgattacgtagtgctgaaactacttttccatggaatgtatcatcttcctgagaacgatagcgcataaataatgacatagcgattactggtgctgcagcttgaagttcaagtgcagtttcaacagtccattttccttctcctgaagagttcattacacctttaatgccatctagtttcggatcttctgcaaatgctttttcagttaagtccattaaccaaccacggataactgatccattcgcccatacttttgcaacatcttcataattgaaatcaaagtcactcttatctagtacttcaaatccttcagcgattgcttgcatcatgccgtactcaataccgttatgaaccatttttaagaaatgaccactaccaacacggccagcataagaatagccattttctactgctaaatctttaaataaaggttctaattggtcgtaaatttctttttctccaccaaccattaagcaagcaccgtatctagctccttctacaccgcctgatgtaccgatatctacataatgtaatccgaagctttttgcttcttcagcacggcgtaacgtatctttatagaatgaatttccgccttcaataacgatatcaccttcatctaataacggataaacatcttttagtactgactctacaacttctcctgcaggcaccattacccaaattgtacgaggagcttctagttcagcgatcatttcttttaatgtatgacgtgcagtaattcctagttttcctgccttttcaacaagctctttatttacatcgtatacaactacttcatgcttgtcttcatataagtgttcagctaatgggaatcccatttttcctaatccaattaaacctagtttcatattaatcaatctcctattctatacaaatatatttaatatcgaaattagcccaagtgctactacagataatatagtctccattgcagtccatgttaataatgtttctttcacagtcattccgaaatactctttaatcatccaaaatcctgaatcattcacgtgtgataaaattaatgaccctgcaccagttgcaagtgctaataattcaacatttacacctggtgtgcttgctgcaatcggcgcaacaataccagctgctgtcatcatagaaacagttgccgatccagttgcaattcgaataagtgccgcaattccccaccctaataatatcggtgaaatatgtgattctttcgccatatctgcaattgtcgttccaattccagaatctaataatactttattaaatgcaccgcctgcaccaatcactaacaatatgtttgcaataggtccaaggcaatcatttgtaaattgtaacactttatcttttgagaaaccttttgcatatccaagactaaagaaagagtaaatggttgcaattaataaagccacaatcggatctccaataaagtgtaatacttgtgctagttgactcgttttatttaatgcaacttctgctattgatgcaccaagcataagaaatactggaagtaaaattgtaaacaatgtattcccaaagcttggaagctcttttttattatctttttcaataaattgctccgctatatctaatggtacttccttatgtatacgagcaccaatccatttcccgtaaagtggacctgaaataattgcagttggaagtccgacaattaatgcatataaaattgtcttccctacatctgctttaaaaataccaactgccgccattgccgctggatgcggcggcactagtccgtgcacaacggatagtcctgctactagcgggataccgattgtaataagtgatacccctgtttctaatgcaattgtaaatactaacggaattaatagtacaaatccaacttggaaaaataccggaatccctactaaaaatgcaacgaacatcatcgcccagtgaactcgtttcttcccaaaacgattaattaatgtgttagcgatacgttcagcaccaccagattcggccatcatttttccaagcatcgttcctagtgctaaaactattgctaaaaatcctaacgtattaccaagtcctagtttaatagaatcaataattcctggatcttttggtgaagttccaattaaaggcattcccattgctaatcctacaccaattgctgttaaaattaatgcgacaaatggatgccattttactaccgtaataagtaaaagtagtatgacaactgccgctagtacgatcccaactaccatttctcccaatccccctattttttacgttggaaagcagctatacaatcaaattcttctttcaagcgattgtaaagtcgttcatacatataaaacatttctaaatatatagccgtattttctttattcggtacatgatgatggacaatatcaatccaatcctttacctcttcaagagaatcaatttttcctacagcatacaaagcaactgccgctgccccaagcgcagatgcttcatgactttcaggtacaagcaattcttttcccatcatatcggacaacatttgtctccaaaatgcagattttgcaaaccctcctgaaactcgtatttcagtaagtggccctgtacaatccctgattgcgagtgctactgaatatacactcatacaaacaccttccatcactgcacgtataaaatgttctcgcttatgttgaagattgattccaaagaatgtaccacgagcatttgcattccagtaaggtgcgcgttctccagataagaaaggtaagaacaatagcccatccgctccagctggtacgctttctgcatatttaattaataaatcataaggatcaatgccgagctttcttgctacttcttgctctggactaccaaattcatcacgtaaccatctcagtaatattccgccgttattcgttggaccaccgattacccagtgctcatctgttaatgcgtaacaaaacgttctccctttctcatctgtatttatatttgatgagattgttcgaaccgcaccactcgttccaatcgtaattgcagccgcacccggtgatatcgcaccaactcctacatttgcaagaaccccatcacttgctccgatgacaattggtgtttctgcacttatccccatcttctgtgctaattctggcttcatacctgataaaatatatgtagttggtacaggggttgataatttttctggtgacatatgtaacatagttaaaacatctttatcccagtttaatgtttctaaattaaataaccccgtagcagaagcaatcgaataatcaactacgtagcgtgaaaataattggtaaatcacatactctttaatggaaatgaatttataggcacttgtatataactctggttcctcttctttcatccataacaatttagaaagtggtgacatcggatgaatcggtgtacctgtacgtctataaatttcatgcccattcatttgttgtaataatttttctgattgcttcgtacttcgattatctgcccaaatgatagaacgcgttaatggcgcaccattttcatctactgcaattaatgcgtgcatagctgtactaataccgattgaagaaatatcttctggtaatacattacctttttcaatggcaacgcttacacttttgtatacagcggcacatattacatcaggatcttgctcagcccatcctacattcggttgaataattgggtaatcgattgcatgtgatgcaatgacttttcctttttctgtgaacacaaccgtttttgtacttgtggtaccgatatcaatcccgattactctcccccttgtttccatgcgaatcttcccttcatttctagcaaaatacgatttagtaaaccgtttacatgaattagtatataaaatattttttcatttatcaagttgtaaaaagaaattttttttcatatcaaaaaataaatcccctcattccatttcacttatatactacatttagcttttccatggggtaaaattacgttatattcgttacgcaatacactctttcctctcattaacaacacatacatagtcctccatacgttctacttatttgcttgaagaaagagttgaaaagcaatattcatttttagcggtcacgtaacatcaccatccagccaagaaaagtaactaaccgcagaatgagaattctgtgcattttgctcttatttattgttttaggttcactagtcttttatcttgataaacatagagcgtggcccccctactatcacttttttaccttgtaaatatatcttgcatactataaaaccgaaaagtatttttatttttcagaaaaataaaaacaataacacgaaatttattgtataatgttgtaaaaagatgtcggagggatttaatgttaaataaaatatctcaattcacaattaagctttcgtcaattcttttatcactcttactattattaaatttaccttatttatttatcactcaacaaggatttacctttcaaccaatttatttttttaatcagaccgttactatgttaaaacaggtttttccccctgaatcattagtgattataggatcagacccgaagcttggccatttcaaaaaaacaccattatttccaactgttttagaaccttacctatattcatttactatattatttttagccttttttcttgctctctttttatcatctagcatggcatttttttattttttagcaaaagattatataaaaaaatggataaaccgaattgtgttcatattagaagctgtccctgatatgatgatgatgatttgtttgcaaatatttttcatatgggtacttcagaaatttggggaatctcctgtcactattatttcttttaatgaaaatcgagcttatttactccctattttatcattagctgtcttacctacattacaaatgtttcggatgatggtgttatacataaaagaagagcaaggaaaacattacgtagaggttgcatatggaaaaggcctttcatcaagttatatactatgcattcatttattcaaaaatatatctatccacttcttccaccatttaaaaacgatttttgttttcttactttctaatttattcattttagaatttgtttttaatatggaaggcattattcaatttttatttaataaggcgtttgtttcacctccagctgcatttatcacacttgttatgattgttttaccattttacgccattttccaaatagtctcattcatgatgaatagatggaaaaagcaattgaaaggagtatcattatgaaatctatttggaaatcaaaacgctttttaatcggctttacttatctattcatacttatttcagctagttttatttatagttggttctttaaagataacatcccaaaacctcctcagttactttacaatgacaataacgaattacttggaaaggccccctttccgccatcgttaattccaccttttggatctgatcgttttggagagtctgttttcttacaaattgtagaaggagcaaaattcactattttattggccatggcaattagcttctttcgaattttatgcggaacatgtataggaatcctcttaagtttatttgctccaaaactcaagagatttttccagtcatgctcagaagttttttattatattccaactctatttatcgcattcatactcatcacgcccgttaatattataatcacatcaaatgctgatggggtagatccaaatatttcatttacgttttatcaagtactcgtacttattttcgtcgctctgcctacactttctttatacatatcctcagaagttgatgaatttatgaaacaagattacatcttaagttcacaattactgggggctagtcgttttcatattataaaaaaacacttacgagtcttattacttgaccgcttatttgtattatttatggaacatatcgtccaaacactcatactcgttatccatttagcgttgcttaacattgtaattggcggcatacaaatgcgtgaactctatgacggagtgctcaaacctgtttctctatctaatgattgggcaggtcttattggattaaatcgtaatgaaatgaatctttcatggtggattattttttatactctcgcttcattctttattacgattctatttattaagcttatgaccatcgggattcaagatgcactgaaagcaagagattcgcaaattgtagcaattcaaaacgttccagatcataaaaaatttgttaaacataaagattccttttcgtttgcaaataaagtaaacctttaatcatttctcattaatcaagtattaattggcatcgatattagtagaaaataaagaagatgatccctattaaatacagggatcatcttcttatactgtctaacttttttacatgtcctttgctagactcatgctttttatatttaaagtgaattatttgcaatcacaattatgttttttaaaatcaattaccatacgcccttgaattctaccttgttccatttcttcgaatacattttgtactttatctagagaacaagtttgaacaaccggcactacttttccttctgccccgaacataaacgcctcttccaaatctttacgagtaccaactagagaaccaactacttcaattccatccagtacaagtcgtgggatgtttaagtccattgtttctactggtagccctactgcaactactttaccgcaagcacgtactgcatcaactgctgagttaaaggctactttagagactgctgttactaccgcagcataagcgccaccaaactcctcttgcacaattttatcagcaggaccttgagaaattggattgatagtcatatcagcaccaacttctttcgctaaggctaatttgtcgtcattaatatctactgcgattacctttgcaccaaatacatttttagcatattggatagctaagttacctaatccaccgcagccatagattacaataggttgactaggtttaatatctgatactttaatagctttatatgtagttacaccagcacaagtaattgatgatgcttgagcaggatctaatccttctggtacttttaccgcataatcagctgtaacgatacattgttcagccataccaccatccactgaataaccagcgtttttaacttcacggcaaaatgtttctctaccagttacgcaatattcacaacgtccacaagattggaacatccatgcaatacttacacggtcacctatctttagtgaagtaacatcatcagctattttcgtaacaatacctacaccctcatgaccaagaatacggccatcagtgttaccaaaatcatgattcgcaacgtgtaaatcagtgtggcaaactccacaatactctacatctactaacgcttcacctgagtgtaacggacgtaattctttgtcaatcacttcgatgtttgctttgctgtttttattaaccactactgctttcatatgtgatctcccctttagtgttttagcattttaatgagtttatctcacaactactttcttcactactttggctagttattctaccaaatttaagtgttcaatcatcattacatcttcatcataacatgacacttcataaacaacttgtgaaattatgaacaatatttgaattattacacaaatcggtctttattttaaatttttaaaaatgagagtttatcattgactataagtaagtcacatatttctaaaacaaaataaattaacaaacttctcaccgataaaaaagctcttcactcaatattttctacatgtaaacacttagtttcacagtaatatcctttgccaccaacataaactttttctattttatttttgctattggttgctaatttaactaatatttcagaaggcgagtgtaaagaataaccttgttcaaatacatagacttcttttttcaagtagtcctgttcataaaggtagcaagctaatgcaccgttcgaagttccagtcgctgcttcttcattgatgtcgtatagcggagcaaaatttctgcatataattcgattgtcattaaaagtatatagatgcatcccgacaacattataatacttgctgatttctttaattttttcaaaattaggttgcagtgcatgtaattgtgtttcgctttttataggaattaaaatatcttttaagcccgtggagacaatttgaattgggtatttattttctatatctttactatcaaaacagtcgatgaactcgtttggagatacaacatcatagaatatcggtttattttgttccatgaatatgatgtcatcttttatagtaatagtaagaacaccgctgttcgtttcaatcgtatagcgattcctgaaaagtttatttaaatgcatcagtatcgcgaaagagccaattgtggcatgaccacataaatcaacttcttcttttggtgtaaaatactcaaatttataatcagcaatttcagattctgatataaatgcggtttccgcatagcccagttgtttggctatttccattttttgagtagtggtcaatgtattctcaataaataccactcctgctttatttccgcctttatgatccttgctaaatgcacttgcaacataaacagatattttcataagacaccttcctcacttatagtaaattatagtatagaaagcactacatataaattccattggataaattatccctaaaataagaaacaaactatttttagcatttgaactctccaaaaatagtttgtctacagtctgaaagctcttcatttgaagagctttttttatattcgcttcatcgaaatcgtttcacgtatactttgtaaattttttagagtttcctcttgtcgctgcaacgacaaccctacatacaaagtatctaataagcttaactgtgctaatcgtgatgaacttgcttctgtgcggaattcagtctcacgtgttgatgtatataacgttatatcagcaagttgacttaatgctgatttcttatagctcgtaatcgcaataattttggctcctcttgctttcgctacttctaacgcttcaagtaatcctttattgctaccagaatgagaaataccaataacaactgaattttccgagagtaaacctgcccccataatttgaaaatgcgaatcagtatgagcgatacaagaaatacccgttctcataaacttatgatacgcatccattgcaataataccagagccaccatttccataaaactcaattcgacttgcttcttgtaaggctcgtacagcctgctcaagtgccgtttcattaagcaaatgtaaagtatcttgcagtcctgtaatatgcgaatgaaaaacttttttagcaacagttaccatactatcttctgctgatacctcttcatggatattttgcatcggtgtatgtacaatttcacgagctaatgtaatctttaaatcttgaaaaccttgcaaaccaaggtttttacataagcggaatatcgtagcttcggaactattcgtaacttcagctaattctgtaatagatttatgtacaacatcttgtggatgtttcaaaatatgttcggcaatacttcgcaatttcggtgataaaccatttaacgaagcctgaatctttccaatcccacttcttgtaccaggcatagcatatcctccccttccatcgtagctttatcctgtaaaaaccgattagttgaactaatcatcagtggggatggtcctccactgattagagtttcactttattgtacctaattatcgaaagaagaaaaacctatattagggattactataatttttaattgctcctatgtattctgtcatacgatataacagaattattcatgcttatgaataattctctccatgtttcactgcgtataatgcggcttgcgtacgatcatccacttccaatttagctaaaacgtttgaaacgtgtgttttcacagtttgttctgtaatatgaagttctgctgcaatctccttgttgcttcttcctttcgcaatttcgcgaagtacctcttgctctcttttcgttaacattgaaaaaggattttctacttccttctttactgcagaacgccccattaatgcaggtgttactttcgggtgaaaattcgcatttccttgatgtactgcaataatagaagcgacaagttgctcaggttgtacttcttttaattgataaccatctgctccagcttcaagtgctggtataacataatcttgctctgaaaaactacttaatataagtacctttattgtctcatcatattgctttagacgttttgttgcctcaattccatccattttcggcatcgatacatccattagtacgacatctggtctttctttttgcacgaaatgtaatgcctcttcgccattttccgcttccccaataatttcaaattcttctctcgttttcaaaaagaatacaagtcctcttcgaacgatatgatgatcctcaactagtagcagtttaatcttcaaccttattctccccttcaaatcggcaattgaatttctatttttgtaccctttttcagctctgttataatttgaaacgatcccttcattaactgaatacgttcctccatacttttcaggccaagtgctgattcccttacctgttcttgtataaatcctattccattgtcttctatgtaaaaatgtaactggttattttctattttcaaaagaatatgtaccttttcacacgaagcatgctttttacaattatgtagcgcctcttggctaatacgccataaaacttcttctatttcatcccccattgaaaccatcccatcaattcgaacttccacttgaactcctaataacttcccgtaattttgaattgcttctgctaatcctttctccaatccttcaggtcttaattgccaaattaatagcgtcatctcttgtaatgcttcttgtgataattccccaatataacttaacatctcttgcaattctctatcttgcgtcatattcagagtacctttcgctgttagcataatagaaaataacaattgttttactgaatcatgtaaatcacgtgcaagtcgatttctttccgctaccactacatatttacgttctttctcaactaattgaatacgttgtattgtcgttccaatttgaaatgcaattgattctaataatgctaactcttcctcagaaaaatgagtcttatgaggtgcagccacatttagtagaccaaatttttctgatccagacctaagcggaattgtcgcatgatgtgtaacatcttctgtctctccccaattacattcaattgcatcttctattcgcttacattcaataatattagtcgctttttccaatctcccatttacaaaacgttctacacaccaacagtttccttcacacatcggcttcttcttttgccacgtaagagcctctggtaaattttcgtctacaagcatactgtgctttccactttcatcaataaagaatatccaccctgtttgtaaattcattacttgtaacaatgtatgcaacactttttctaacatatcctgtaagtttgttgcttcatttaataattcagcaatttcttttaatgcttctaaacgacgcatctctttttcttcaaagttcattctcatcaccaactacaattataacattaagaaatttctaaattctataaataaaaaaagaaccgaattccttcagcctttctttatatcaatcattttattattgttattctatccaatgttggaagcagaatttttgttaacaaacgattctactttagctgtccgataaagattgtccaccatggatatgctgtaaaccttcagtagtaacaaccatattcgctgctggcatttgcacttgatttttatggaacatagacattaattcaaatcttacttgtctagaagtttcaaaataatcttctggctttattaaacctgtaatacaaaattcatagccaacatatttcaagttaggatttaagtctgtaacaccgacgtatttaaatggttcaacagcctcatcctctactctataaagagtttgattcaatttttcattgcatataacacatacttcttctaacaattccttcactcttgttggatcttcctgataacttaccgtgatgcgttcaattacacgcatccatcctttattaaaattttgtatcgttctaatctctccgtgcgggatggtaagtagttttcctgaccattcacgaatttgcataaaacgaatactaatctcttcaatagttcctgaatttgttccgttaaaagttacaaaatcaccaacccgaaactctttgtccgctaatcttgcaaagcctaatataacatcttttagcatctgttgtgcagcaaaaccgatgacaactccagctatccctgcacctgcaataatactttttatatctacaaattggctaattaaatatatgataagactgatgataatgatatatctaaaaatagatcgaattacactttgaatcgtttgctctatctcttcatcaaaaaagctcgatttcctaaaaaaccaatcaataatgcggtttattacaaatgaaataatgattagaacgaaagcaaatagtaaaaatcttaaaagtaaaaactctcttacataattaaaaaattcttccgtatacgttaataagctcatttaaccacttccttactaattaaaaaattcataatcgcctaagtttgttccagaaaaatctattatcctaatctaaaatgccgctacccttactatgtattttgactctattactaattcactttaaacagtatgtctagctgttctttttcctttccctttaaatataccctttttaataacctaagggggagcaaatcgtgaaatttttttatacgttaaaactttattcatctcattacgatttcaactcatttattcattaactacgtaaaaaaagagctgaatttatcagctcttttattcgatattaattgttgtcttactacttttttcttctttcaattttggcaattcaattgtcagtacgccatctttataatttgctctaacattttcttcctcaacttgtttaaaactaaagcgtcgagttacagaacctatagaacgttctttacgaatatatgtgccattctcatttttttcttctacttcattatgattagttgcttgaatcgttaatacatcttgttcaaaatcaacttgaatgttttctttttgaaaacctggtaaatctgctttcacagtatatttatcagattgctcatgaacatctactttaaaagtatccatgttcagtggcttcaagaaagcatctgtcatcccttctaataaagaaggcccaaaatcaaaaataccattttgacgttttgttatctctggaaataaattacgcatattttttcctccttattatttatgaatgaaagattatctctttctgcctttattataacatttggtcaaaaaaggtcaaagtttttgtttgaccttttttgatgtatattttaccaaataaaacacatgagatatttgacacctcttacatttataaagaggaatatatttatataataacgaatagtttatatgctcttatttttccttaatgaggttacctacaatggggtatatcgaagaaattagagaagttgtcggatcaagaccactcaatttattaggcgttgcggtagctgttttcaatgaacaaggacaaataaaagagaccttttttaaaggcctcttttttcacttcacttctgcatgtaggcatgacttaaaatgtccaagtgcatattcatgcccttgtgcattaaaagatgcaaccgccttttcataaacaacaattttaaaccctttattataagcatctactgctgtatgaagaacacaaatatcagtacaaacacctacaagatgaacttctgctattcctctttctcttaacttcatctctaagtctgttcctgcaaatgcactataccgtgttttatccatgtaatatacattctctgcatttttatatgtttcgtacacatcttgtaattcaccaaacaaatctcttccacttgtaccagctatattatgaggcgggaataactttgattctggatgatatacatcattttcttcatgtttatcaatagcaaagacaacgtaatctccattttcaatatattgcttcgttatatgtacaatttccttctcaatttcctgtcctggtttcccgcatgttaaagcgcctttctcagctacaaaatcatatgtataatcaatatttataagagctcgtttcattactatctctccttctcctgtttcacagtaaacaatagaaaatttgttattacgacatcgtatgtactattcgacatttcaaatgaaatacctacatttttcttgcaaaactcaccttaatccgagtttatcataaagtgaaactttaatcattggagagtttgttcatctccaatgattatcagccctcatcaatcgtgcatttacaggcagttgatctcccacctaatctcctcacctataccgagttttaaggtaaggtcttactgcccgttagtgcgggatataatagataaacaatggtaaaataaatagctcctattaataagtcatgaatttgataattgagcgtagcttgaatcatctcttgtatcgtaaaccaaaatactgccatcatcatactaatcaagacgatacgaatacaccgattcacatcttcaacctctttctctgtcatagtagtaacaagtgattacttcctatttaatcgtattagaaaatgaaataagttattcactcttgcacactctagtccaaacaaaaaagcacactactttttgagtaatgtactttttattcttgttaagacgcaggttttgtctcaaatgttgcttgattaaaactaataacctttcctttcgggtcattgttttcatactgaactgcagtaattgtatgactacctgtttccagcgttttttcttttaactgcactgttgtctgcgttgtactagttacttgatgtttatctgtatacatttgatctacaaatacgaatgtttctttatcactttgaaaattagaaagttctaattcaacttgctgaattaacgtatcctttttgatgaatacagtcggtatattgccgttttcagaagtaccatctggagtaataacttttactttcccttctccaattgacattgctccttcaggaaatacaaccatattctcatcacttgcgtttacaacttgttcttcctgttttgattgcgcgtcctctttttcctgtggagcaccgcaaccaactaataacaatacagacaatccagtgattatgaattttttcaaaattcatcccccctgtaacttcattataatttattatacaaaaataacttttaaattttgagactactttcaacactttcatgaacaaatagaatcttgctcacgattaatgtatcatactttccttaatagaacattaattttttttatgaaataaatagtaattccctcttatctatcattttagcccaacatatgaattacataccctcaaaaataaaaagacattgttagttcaatgtcttttctatgcagcaattaaaaaacaaacgttgtaatctcatctacttcttttcttggaagtttcttcggtttatctttcggaaatccgagtgaaataaccatatttatttgtttttcaggctcaatttgtaaatattggcgcagttcatcttgagctagcaatactggccctgtcattggacaagtaccaagtccctttgcatgtgcagctaacattaagttttgtgccgctaaacagctactcttaatgccttcttcttcccaaacggaatctggaacaaaagcaattggatcaaatatcttttcacggaactttgattcatatggtgttgccaaacatacaattaatactggtgcctccgagaaagctgttgcatatggtccgaaagaacgtgtaagtaatttccctgctttctcttctccattttctgctgcttttgccgcaagtttatgtaatgcatcccatgtcatttgttcaatttctttaatcttctctcgattcatgataactaagaattcccacgtttgtgaattcgtatcactcggtgcgtaacgagcacaatcaattatttcttttatatcattagtagatacttcttgatttgtaaactttctaacacttcgtcttccgtgaattacttctttaaaatcttcataattcatatattaaatcccctttttacagcgttttcaaaacttgtcctatgcttgaattatatcatgaaaaaaagccggaagaataccagcttttttcttcatgattaatttgtcactttaaacaaacgaatactctcttcgtatgcagcttgtagttttttcgtaattggtcctctttcaccagccccgaactgttcatcaccaatttgaacgactgggaatatttcaagtggcgtcgctgtaaaaaagcactcctcagcgtcatatacttcttgtaatgaaaactctcgttcctctacatcgatatgtaactctttcgctaatgtaattacgtagtgacgtgtaataccatgtaaaatgaaatgatccgctggatgtgtaatcaacttattattcttcacgataaagaaattggaatgacacccttcagtcacaataccatctcgtactaatattgcttcttgatacccttgttcatttattttgtttttgatcatgatattaggaagcaaatttaaagattttatatggcaaaacttccacctgatgtcctcttctactgtcaccttaatccctgcctccattgaagcaactggtcttgggaacgaaacaagatttgcaaaatatgtcggttgtaaatctgattcatatacatgattgcgcggttgtgtacctcttgatatttgtaaatatacattcccatcttcttgaaactgatttttttcaatcatttgatataactcttctactaattcttccttcgtaaatggtggaattagttttatttctgccatagagttaaagaatcgttctaaatgtaaatctaataaatgtggcttcccgtcatatagtctgaatacctcgtatataccatcaccaaattgaaagcctctctcctctaatggaatcatcggctgttcttccttcgtatttacaattcttccgttaaataaaatccaatctttatgagtagctttcattcttccccactcctttatcacatgattgttttaattgtacaacttatctacactcaaaagaaggaattttctgtattttaacaaacaaaaaagtgcatctcttatttaaagggatgcactcgactattcatttacttcagaaaatatttttcaatatcatctaacataagatttgcagctacaataccacctgctgtattccaaatcacttcatctacttggaatactttattatttttagaagcctgtagttgcttaaagagtggatcttctgtccattccttcgctaacgaatttccttcattattcttatctgcatctttatcagacgtgaaatagaataagtagtctccgtccatatttggaatctgctcttttgtaattccttttatcgcaaaatcatctttatcttgtaatggtggtcgtttaaatccaatatcatttaaaacaacacccgagaatgagtttttttgataaatacgaacatcacctggcacgaaacgaataatagaaactttagaattcaatttatcgcctaacttctctttcattccttcaatgcgttttttataatcatcaagagctttttgcccttctttttctttatttacagcttttgtataaagtgtaaagttttctttccaatcaccgcgtaatgtttctgcataaacagttggtgcgatttcttttagctgatcatatattttttcatgacgcattttatttccgataattaaatctggcttaagcttcattacagcctctaaattaatatcacgttcagttcctacaacttccgtgttttttaactctttcgctaaatgaggataccattcatcaccagcacgtggtttcgtagtccccactggcgttacgcccacagctaggagagcctctgcgccttcatttgttaaaacaacaacttttttaggtgtaccatttactgtcgtttcacccattgcatgctttaccgtatatgaatcttttgctttcgctgatatattattttcttttttctcttctttactacatcctgcaattacaaccatgagtatcataatgcagaacataattagttttttagtatgtatcatatgtcctccctagatgaaatcgattatcattaacatttaaagattaatgtatcttatatacattgtcaatgtatataagaaaacttttttaatacatactatttagattctatccgcttttctaaggtttctttttaaaacatagtgcataagtatgaaaataaatgttgttattaaaatgcgtatccttgttatacataacaaggatacgcatccatattgcattatcattttaattcctaatattgagtatatttaatatacgctgggtcattatatacccactgatttccaccaaggtttaaccaaccattttcatttatatatactaaataagattctggagaatttaattggcggataactgcagatgtagttgatggaccacttcttaaatttacattcatcccttgtatatatgcaaccccaatcgggcttccatcactattgcttgtctttacaaaattaatgtacgaaggatcattatacacccattgcccattccccaaatctagccatccgttactttcctgatatacaacgtaagattctggagaatttaattgacgaataactgaggaagaagttgatggaccatttcttaaatttacatttttcccaagaatataagcgattcccttcgtttgaggtgtcggttgtgggttagggggttgtggatttggagctactccaaaaatagctgctattccatttgcatacgattgacttagatcttcaataaattgtggattttttaataaatttgcatcaaacgctgtatcaataaaagcagtctcagttaaaattgcatccattgtggtttctcttaataccgcataattttctttttttgctcctcgatcacgaagaccatattttgttaatacaggattgacagctgtatgcattttttgttgctttgcatatgcagtgctgctattggataacgcattataaatataactttcaaaacctgtacccccgccgctattaatatgaaatgaaatgaaataaaataatccgcactgaaagcattagcaatattagcacgttcagataaagaaataaacacatcactatcacgtgtcattttaattgtaattgggtaatttaccgttaaaatgtctcgaacgcgtctagcaatttgaagtgttaagtttttttctactaaaccattaccaacagcaccagaatcatatccaccgtgccctgcgtctataacaagtttcattttattgccccgcccctttcttgtaatatgtttgcatttctactcgtcctattttatgtgaaatgtacaggttctgttacaattgcaaataaaaaaaccgccttatgtaaggcggtttctatcatcttgctttaaccaatttaaaataaatatatacgattgatagtgaacataacgtatgcaaaataaaataaataaaagtgctattccaacaccactataaagtaaaccaaactttaaaaaaacatttacaagtggtggaaagttcattaaattttgtaatgtactaagcatacaaaacataatgaaaaagacagagatgtattgtaattcatacggcttttttttcttactcattcttttccgaatgattatatgacataattctgctactataaagcaccctccaattaatacaagaccagaagtcatcgtcatacatccacctgccttatatttattgtatcgcataaataatcatcgttatattttctttacatactcttcatcttctgaagcaaaaccaaaactctctatgaaagacttcgccttttctgttaatttctcttgtagcactttgatttctttcacatttctttgtttcatcatttcttcaaatgtaaaatacgtatttgtaccataaccgtaaccttggtaatcaaaatgaataattagctgtgataaaacagcccgttcctcttgtacactataatctattacaccaatatatgtatcatcaactttcacacagtactgtacctttttctcacctaaactatgcgatttaaacatttctttaacaacgctttcattttctacagtaactttctcaaacgtaatcatatgttgtccatccttttactattattgtatcaataatacttcctatttatgaaaaaaaccttaagaccgtatgcgatcttaaggtttttctaattaaactaagctatacgcacgttttgtttcttcatggaacttattcgtatcgtatttatgctcaacataaatttggtgccataccataaacgcaagtacagtccaaattttacggctataatcgcctttatctgcacaatgtgcttccagtaagtttaatacatactgtttgtcgattaaatgctctgtcttactttcgtttataatatttatagcccaatcatgcatttcgtcttttaaccagtgacgaattggtactgggaatccaagttttttacgatctaatacgtgatctggaacgattccgcgtgctgcttcacgtaaaatagctttcgtagttccgttagcaatcttaaattcagttggaattttagatgcaacatcgaatacttctttatctaagaacggtacacgaagttctaatgagtttgccattgtcattttatcagcttttaataaaatgtcaccgcgtagccatgtgaacatgtcaatgtactgcattttacttacatcatcataatctttaatctcgttatacaatggtttcgtgatatccatatagttaacactttcattgtaatacttcattaattcagctttttcttcttcacggaagattttagcatttccatagtaacgctcttcaattggtgtacatccacgctctaggaagctcttacctttaaatccttctttaagagcaccacttaatgcttttagaacgctcttacctgggctaggaatgtaagagaacatttttagtgagtttggctcacggtaaatgttataaccaccaaatagctcgtctgcgccttcaccagaaagaacaactgttacatgtttacgtgcttctttcgcaacgaagtacaatggtacagctgctggatcagctaaaggatcatccatatgccaaatgatttttgggaactcatccataaattctttcgctgaaatgaatacgttatggtttttaacgcctaatttctcagcagtttctttcgcaacatcaacttcactgaaaccacgttgctcaaaaccaacagagaatgttaaaagatttggattcatttctcttgcgatagaagcgatgatagatgaatcgataccaccagataagaatgaacctactggtacatcactacgcatatgcacttttactgaatcatataacacatcacgaattgcttggatatgctcctctttcgttgcacttgaagcattgaaataaggtttccagtagcgatggatttccatctctttaccgatttcttttacgaaataatgaccaggctcgattttattaacatcaattgttaaagtttctggctctggaccatattggtacgtaaagtaatgttgtagtgacgttggattaacgcctttatcttccatcacatgcataatacttttcttctcagatgcgaagaatgtagtatcaccttgttgtgcgatgtataaaggtttaataccgaagtggtcacgtgcaccgaaaagtttcttttcttcacgatcccaaatcataaatgcaaacataccacgaaggtagtctacacatttttctttcatatgtgcatacaatgcaatgataacttctgtatcagattgcgttgcaaacgttgcacctttttcaagtaacatttcacgtaattctacatagttgtaaatttcaccattaaaaataattacatatcgatcattttcataagttagcggctgatgtcctgcctctaagtcaatgatgcttaaacggcggaagccaaattgtacatgttcatcacgaaaatatccttcgtcatctggaccacggtggaaaatcatcgtgttcatattttcaaattgatgtttttctgtttctgaaaactctctagggttttcacataaacatcctacaaaaccacacatacttcttaccctctttcagttttcattctgtctctatactactatatcaaccctatttatactagcataatcaactgaatatggcgaccaaaaactataaaaaaatcactccatttcacatttttaacaattttttatgaaaacatgaaaactaggcactcacctttctccgcttttgtcatatgatattgcaaattgatttctaggagggaataccatgagtgaagaaaaaaaagattcttctcgcccaccggttcgtaattacttaaagcaaattgatgatttcttcgagcaaacacctcttcgcaatgtaatcgctgatttaaatcattttttccaaaaaggaaaccgtttattaacattccctgtagatttatatgaagttggtgaagaactcgttgttacagctgaactaccaggtatacaaaaagaacaaatccaaattgaaatacaaagtgaatacttaaaagtctctgtaaaagaagagatacttgaagaggaagaagaacaaacatcccataactattatcgccgagaacgttccatttcagaagcatcaagattgattaaattgccgtattcaattaataaaaaagcggcaaaagcttcttatcaaaatggcgtattagaaattcgggcgccgaaacttccccagcaacatgacattttatcgatagactaatgcaaaaaaataagggtgctatgcacccttatttttaacccactaatcgcttcatatcacgtataatgtcttcgtatggcgtattactaatgccactatactttttcattacttttccgttttgatcaattaaataaaatgatgtaccatgcatgacctgaccgttctccggcttatctacaagtgattggaaattatcttttgaaaactttgtaatatcttctaacgaataccccgttaataaattccagttactagtatcctctgtaaacttttgaataaaagctttcagattttctggcttatcaaggtctggatctacactaaatgaaacaaactgaacgtctaatttctcttcttttgccatcttttgaagcttggccatatttgcagtcattggtggacaaactgtctgacaatttgtgaacataaaatctgcaacccaaactttcccttttaaatcttttgtaccaaattgctttccatcttgatttgtaaattggaaggtttctaaatcccaatttaatggtttacgaagctttgaacctgattcactacatccagcaagtacaaagagacaaaatacaaccataagaccaattattttttgataacgcttcatttataaacctcttttctctatcctaaatttaaataggttatgtttataataacaaaagttaacactacgagaaaattgtttactacatttgttcacgaaatcgtacgaatttacgtatgttacttctttatttcaagcgaattactagacaaaatatatttttttactattatttctctaaataaaagtgataaaactaattttattgttacttttgtaaatacctctccctattttttaacaattccttaaacattaatccatgttttacactgtattccttaacaacatttcggtacaatacaaatacaacgattttaaatgaggtgatgttcatggcaaagcgctatgaaaatatggataatgttagtacaaaaaaatcaattcgctcttttttacgctggcgtaaagaacgaaagcaaaacaaaaaagatttttctttcttagtagaacaatcacccgttaaacaaagtgcatttttacaaagtaatgttgaaaaaacgactatcacatggattgggcattccacttttcttatccaaacgaatggacttaatatattaacagatccagtatgggctaataaattaaagctagttccaagacttacagaacctggactctctatagaagcactacctaaaattgatattgtccttatttcacatggtcattatgatcatttagatttttcaactcttcgtcagttgaatgatgatgttctatatcttgtacctattggattaaaaaaattatttactcgtaagaaatttaaacatgtagaagagtataaatggtgggaaagtacgataattaacgaagtttcttttcacttcgtacctgctcagcactggacgagaagattcttatttgatatgaatacgtctcactggggtggatggattattgataatgaaacgactatggaaaccatatatttttgtggcgacagtggctatttccaaggtttcaaagaaattggtgaacgctttttaattgatattgctcttatgcccattggcgcttatgaaccagaatggtttatgaaagtatctcatgtttcacctgaagaggccgtgcaagcttatttagatttaaacgctacacattttataccaatgcattacggagcttttgcactcgccgatgaagcacctcgtgaagcaataactagacttcgaaataattggaatttgcgcatgttaccgtgggaacaactgcatgtactctttttaggtcaaacttttatttatagtaacgcaacaaatgataagcaaataaacgaaaaaattgaaactttacatgtgtaacgtaatgactgattttctatatccaacatataatatagaaaatcctatagtgaaactttaattagtgggatttcttcatccccactgattatttgccttcaccgatcaagcttttacgggcagcccgctacctaacctctttgctccagctaaatttgaggtagagagttttactgtccgcaaatagcaggataaagggtgttttctatgaatgaatatttacagactcgctatatcattagcggtagtgcctgtgtagctcttcttatttcttactttctatttacataaaaaagctacttgaaatatattttcaagtagcttttttattactctgctaaatacataaatccgattgcgcccggacctgtatgagtactaataataggcgttgtatagaaaatttctgattgagcaaatccactcactttttcaaccgccgctttcatactttcagctaaaggaattgctttcgcatgcggaattgcaacagcttttacgacttttccagccgtatcttgctcaaataacttagctaatgtttttacaatttggccttggctacgaactttcgttacaggattataaacaccgtcttcaagactagcaattggctttatattaagtagcgaaccgataaacgcttttcctttaccgatacgtccacccttcactaagttttctaatgtatccactactacatataaacgagtattctttcttacttcatctacacgttttaaaatttcttctagtgagcgtccgtcatttgccatttttgcagcttcaattacttgatatgctaaagcatgtgtaataaattgagaatcaacaactgttacttttgtatcagtcattgatgcagcgctatttgcagttgctacagtaccgctcattccacttgtcatatggatagaaaggacttcgcttccatcttcccctagcttgtcatacatttctacaaatgtacccatagctggttgtgatgtttttggtaattcctctgatttaatcatttcttcaataaattcgtcaggttgtaaatcaacgcgatctaaatatgtttgtccatttacagagattgataatggtaaaacatgaatgtcatacttttcgattacgtcttgtgataaatctgccgttgaatctgttacaattttaattttttgcatactatacttcttccctttccaatacgctctccttgttattatactagtattcccattgctttcaacaatttggaacgaaatttcatcaaattaattatattttcatatctaaaatgaaaaagacagagtttactaaccctgtccgtacttcgtatcatgcatttttttcaagggtatttgttttatatacatttaaataatcattccacttcaaacaattttgtaaatattcacggaaagaatacgaaaatcttgggtgtttttgtctttgaatttttgcaataaataattgaagacgagactgaattagaaacgataatggatgctgtgcctgtaggacagggatttcgaatattttaatgcaatcccctgttgaatgagtgaaataaaaacttttcgtaatcacaatatcaatcctctttttcattggatttttgaacttcctctactttgcgctgtaacacgttgtttaaagtggagtaaaatcagacttatatgatttctgtagtccttatggctagaagatttatactctattcatctccacctaattcaccttcccgtcctaaatatctctgagacgggaatctcattatccatcaattgtttaatacatttagtataagcttataaaagcgcaaagtttgtctaaattttggagattctataatttttttcttctatatattgtatacgtttatagctatagtataacaaataaataaaaaagtgcctttataacgaggcacttttcgactgcatttcttctcttttctttttcctcttactaacaacctttgataacgcaatacttacttcataaatacaaataagcggcactgcaactaaactatgagataaaaagtctggcggtgatatacaagatgcaatgataattaatgctacgtaagcataccttcttatttttattaaaaattccgccgtaagtattccaatgctagttaaaaacattacaacgactggcaattcaaaaatcacagcaaatggaactgttaaattaagtacaaaatgaaaatacttttctgtcgtaaacatcgtattaaacatttcattacctatcgtagttaaaaagtgaaatagaaacggcattacaatgaaatatccaaaacataaacctgcgagaaataatatagacaataccggtatatacattattgtcatcttttgttcatttggatgtaaacccggttttacaaataaccaaatttgtatagcagcaaaaggaattgtacaaacgatagcaaatactgtagcaatcgagaaaaaaatccacaatacatcacttggaccgagaacagttaatttcattggtaaatcttttacaagccaaaaataaatatcctttgtaaaagtaaatccaataattaaaaatagtacaaaggataacaccgtatatattactctttttcgaagctcaacaatatgttctactacgctcatttcccgatcttccatctcgttcaccacactttatttatccattacaaggaaaatacactacattttttctttcttttccttttcttgaaatgcgtcatctgtcaattctttcgttgattttttaaactcttttaacgtttcccctaaagccttcccgatttccggcaattttttaggtccaaataaaatgagtactgctactaaaattaaaattaaccctggaaagccaatatttgaaaacatttccccatcccctttattagtagtttccttgtcctactattacataattttattttgtcaaaaaagtttgaaaacgtcaacaaatccattgtcttttgtcaaaaaaattcaaaaatataatcaattatacaaatttcattttctattgctcttgtgtatgatatggtaagggaaatgacatattattttatgatagtagaaaggatttgcattatgactgaaaaaatgacacgaatgacccaatttgtaaaagaagaaattgcaaatgcaattacacatggtatcggtgccattttaagcatccctgccttaatcatattgattattcatgcttctaagcacggtaccgcatcagctgtagttgcatttactgtttatggtgtaagcatgttcttactgtacttgttttcaacattgctacatagcattcatcatcctaaagtagaaaaaatatttactattttagatcattcagccatttacttattgattgctggcacgtatactccttttctacttattacacttcgtggcccattaggatggacgttgcttgctataatatggacactagcaatcggaggtatcgtcttcaaaattttctttgtacgtcgctttataaaggcttcaactttatgttacatcattatgggttggctcataatcgttgccattaaaccactttatgaaaatctaactggacatggtttttcactacttttagcaggtggaattttatattctgtcggagctatattcttcctttgggaaaagctacctttcaaccatgccatatggcacctgttcgttttaggtggtagtgcgatgatgttcttctgtgtactcttttatgtcttacctacagcataataaaaaaggattcagcttactataagctgaatccttttttattacttatgtaattgtgatgcgataacttcctgtgtatgcttcgttaattctttaatatccatattcgcataatcttcaggtgtaatcggcttagaaattgttactgttgcatgagctggcttcatacgatttccattcgcttcaaacatcttatatgtaccatctaacgttacaggtaaaattgctacacctgactttactgccagatgaaaactaccagccttaaactctccaacttcgccacccttacttctcgttccttcagggaaaattacgatagaatgtccattttttaatagttcaattccatctttaatcgcttgaagagattgacgacgatcgctacgatccataaatacacaattcataagttccatccaagttggtacaactgggaactttttaatctctgcttttgaaacgaatccaattggtttatttaagtaacctagtaaaacagggatatccatattactttggtgattacttacaactagtactggcttgtctttcggaacattttcaagtcctttcacttctactgcccctccagctacacgtaccattttcttaccaaaccaatttgtcgttttatacacagcattatctttttcttttggcgccatcgtatttacttgtcttttaagacgccacattctcggtgtaatcgcaattacgattaaaattaaataaaagattttaaaaaacgtttgaatcatacagaacccccacctattatcattccgaccttcattatactagacaaacgaaggaaaaagaagaaaaaaagtccaaacagcaagtgtttggactttttaagcattctatattagaaacgttttgctaattcacgagcattagcaattgctgcttctttaatttcttgtgctttttcagggtttgcattcataccttcaactgcgatatattcagtatcatttacaccgacaaatcctaatacagtctttaagtgattgcgaccgaagtctacagctgcgtatgctccttcagaatatacgccacctgttgcctgaatgtgaagtgcttttttaccttctaataagccgactggaccattttcagtatatttgaatgttttacctgcgattgctacgttatctaagtatgcttttactactggtggatagctaaagttccacattggagttacgaatacataacgatctgcattcataaatgtttctaagtttgtgttcattgctgctactttttgttgttgaacttcagttaaagcttcaaagccttcacctgctgcaaatttaccccaagcagcaaatacatctgcatcaattgctggtactgtagtgttgaataaatcaattgttacaacttcgtcttgtggatgttcgtttttataagcttcgatgaaagcctcccctactgccattccgaaagaaccttctgctgaatttggatttgctgtgataaatagtacttttgtcattgtattctctcccttttttctctttatctttaattcaagatttgttttttaaaagttaataacttaccttatgtaagtataatacaaaaagttttaatcaatgtcaataaaaaatagctacttttttttcgtaagttaatgatttactttgtttccttaaaatttagtatacagatattaagaattctttcgtataaaaaggctacctctacaacttatagagatagccttctattacatattatttttgaaatacatgttttactttttcagctggaatattactcccgcctctaccttttacatcttcaatcatcattgtaatgaccatatctggtgaatttaaatcaaatgcagcgaaccaacctagttcttttccttcggcctcttttgatacttttaattccgctgtacctgtttttccagcaagagtcataccatcaattttagcaattttccctgtaccatctggatcattaattactttcgtcattgcagtttttaatatatcctgatttcctttagaaattacattttctttccaagcttttggttgtttatctgttttaataatatacggtgacggaatagttccatcatttacaatcggcgcatacgttaaagctaaatgaagaggagtcattaatacttgtccttgtccatatcccgtatctgccatttgaatatcatttttaatgccgtcatttgcaattttagaagcagggaatccatattcaattggtagtttctcatcgaatccgaattttttcgcttcactcataaacttgtcttttccgatttttaaagcttcttgtgcgaagtaaatattatccgagtatttcatcgccttatcaaaatcaatcggatttgcatctttcacacgcgttacatagtaattaccccaagaagaatcttttgtccattttaatccttcaattttcaactcttcttttggatcaatcgttttcgtttcaagaccaattgcagctgtaataggtttaaatacagaacctggtaccgacaattgtgtaaaacgatttgtcattggttttttcggatcattattccaagcttcgcgttgtgccttcgatgtccctcgtgcaattatattaggatcatatgctggactacttactagtgcaattgtttctccacttttcggattaattgctgcacttgaaccagcttcgcccttcatttcattatacgttttttcttgaacaacactatcaatagttaaagttacattttctccatcaacagcatctgtttttgctaaatttttaatttcttttccttgcgcatcttctacaaagacacggccacctttcttaccgcgtagcttttcctctaatacttgctctaagccagctttaccaactgggtcatcagcttgatagcctttcttttgtagcgtttttaaatcttcagcatttacctttccaatataaccagtcagatgagctgccgcttcccctagcggatatgtacgaacatttacaggttttgttgaaacacctggtaaatcaatgtacgtattttgtgttgccccttcaggcaaaattccaattggtacgagataccctggttttacccatttagcagctaatttttgatcaatttcttctacagacgtatttaataacttcgctactgtttctttcgtttgcggagcagtatcgcctaacttttcaggaatcaatccgatttcagaagctttcccattcgttgcaagaccttttccattacgatcgtatatttcaccacgttttggctgtgttgtctgcatacgcactttactatctttcgtcatgccagggaaaataaaatcaggagtccaatctattttccaagattctttatctccatctttttcttttaccatttttgcttcatgaccaaatgtgattttaccaccaactgtatccatgcttactttaaaaggaacaggaccttcatcttttttatcttcttttacttcccctgtttctacctttaagtctttcacttcgataccagaataaattttttcatatttctcagtaaactctttctttgaaatatctttttttgcattttttgatagttgatcatacatatctgcaaatttttgtttattccacgcttttacatatgtatcaaacgcttcttgtggtttttcttctttaccacatccaactaacatgaatgttaagcaaagaaaaagaatcccccatatctttctcaatcgattctcctcctctttctatattagtacttttgaaaattttagcatttttacatgctacctatcattatagcactatcgaatctcatctataaacttatattggtgaatataaataaaaagattgatgtgaattctcacatcaatcttttttattattgttgcttctcatatacatggtaataatacgtatacgggtttttttcatccgttaaacctttttctacaaaaatctctttccaatttgtcatatccatttctgggaagaatgtatctccttcaaatgcataatggatttttgttatatataacttgtctacataaggtaaaaagagatcgtaaatttgcgctccgccaaaaataaaaatctcttcttcatttttacatagttcaaatacttcttctacagaatgaacaacttcacacccttcaacatgatacccttcattacgagttacaataatattacgtcttccaggcagtggtctaccaatcgcttcatagttctttcttcccataataagcgggtggcccatcgttgttttcttcacgtattgtaattcactcggtaaacgccaaggtaaattattatctttaccaattactctattttcgtccatcgcgaccataaatgaaacaatcattttttcatctcctctacaattatactgcaaccggtgctttaattgctggatgcggatcgtatccttcaatcgttaaatcttccatttcaaaatcaaacacagatttcacatctggatttaatgtaagtttcgggaatggacgtggttcacgtgccaattgcttttctacttgttcaaaatgatttgtataaatgtgtgcatctccaattgtatgaacaaattctcctacttcaagaccacattcatgtgcaattaaatgtgttagtagtgaataacttgcgatgttaaatggaattccaaggaatatgtcaccacttctttgatatagctgacaagaaagttttccgtccgctacataaaattggaataatgtatgacaaggcggtaatgccatactcggtacgtcttcaggattccaagcagaaacgattaaacgacgtgagtctggtgtttttttaatcatttcaattacatcttttaattgatcaagtgtctcaccagctgtcgttttccaagcacgccattgtttaccgtaaacgtctcctaaataaccatatttatttgagaactcatcatcttctaaaacgttctttttaaacaattccatttgctcatcgtactgtactttaaattcttcatcttgttgtgagcgaagaccaaaatcagtcatgtcaggaccagtatactcatcactttctacccagctcttaaacgcccattcattccaaatgttattattatgctgcaataaatagcgaatatttgtatcacctttcataaaccaaagtagttcacttgctacaaggcgaaatggtactctttttgtcgttaataaaggaaatcctttgctcaaatcaaaacgcatttgatatccaaatacagatacagttcctgtccctgtacgatcttctttcttcgtaccatgttccattacatggcggcataaatttaagtattcattttcagcatgtttcatatgtaggaaaaccttctttcaatcgtatatggaatttatcataacatgaaaaatggtaaatttaataatcttaattaataaaatttcttgcgctaattcttacaaaattattaactttccatattttaaaaggttttcattttctattaccgaaagtatagtgcggtagatcaaaatttatatttggaggttagaaatatgtctaaaattgaaacacctgttatgacttctttacaaaccacggttgaaaaaatgatgaaggatttaaatgttcctggtgttgctgtcgctgttataaaagacggtgaagttattctttcagaaggtttcggctatcgtaatatggaaacaaaagaggctgttacaccgaatactcgattcgcaatcggttcctcaacgaaagcgtttggtacactttcattaagcttgttagcacagcaaaaaaagtttaattgggatgctcctgtcccgtcttatatacctaactttactttatctgaactacttgctagctcacaagttacaggacgggatttagcttctcatcgaactggagtgagtcgtcatgaggctctttggtacagttcttccttatctcgaaaagatctcgttgaaaaaataaaacatttaccacttgatgcaccgttccggactgcatttctatataacaacttaatgtatgcaacaattagctacattgttgaaaacattacaaatcaaacgtgggagcaatacactacagaacatattttagaacctttaaatatgagacatacaaacttctctgttaacgattcacaaactacagatgattacgctttaccttacattgaaaatgacggtgaaataaaagcagttccattccgtaacatcgatacagttggcgctgctgggtgtattaattccacaattgaagatatggcaaattgggtacttctccacttaaatgaaggaaaatttggagatcatgaattaatctcctctgaattattacaaccaatgtatacaccacacaattcaattccagaccaaccggttttatcactccctgaatctccattaaatagttacggtcttggttggtttattagcgcttatcgtggtaaaaaagtgattcatcatggcggtaatatcgatggattttcagcgcttgtttcattcataccaacagaaaacataggccttgttattttaacgaatgctggaggaacattacttcctacttatctcgctaatcaaatttatgacgaactacttgaattagaatccattgattggcataaacgtgctgtagaagatactaaaaaaatgaaggaaatgatgaaagaagcaactgaatccctccctgaacaaattaaagggactacaccttcgcacaagttagaggattatactggtacttttgaacatcctgcatacggaacattacaagtatacaaacgagatgattcgttatatgtacaatttatggaaatggatattcaattagggcatcatcattacgacatcttctccacaaaagttgacttattccaaatgaaaatgagcttattattcgcttatgaaatgaatgtaagtggtgaattcccatcccttcagttacatgtaccagctacattaagtactcagccgcttacatttaagaaaattaaataagtatcttgatgttaaaaaataaaggtaggtgcgaatcacacctaccttttctatttcatatcaatcttatctggttgaaaccaaattggcttcgataactcaaagttattatgatcctctaaaactatagtaagacgctctaacatatcatctaacatatgcggcgctgctcgtaatgtccagacaactgaggagaaaactgtcatgccaacgtacaccgtgtataatttccagaactcctctggtattttcctattaaagtatccttctatttgtccgattgaatacggaatactaatatcccttgcaaacagtgcaatttttacgaaatcatgaattgggtcgccccagtcatagccattaaaatcaacaacacctacatattttccatcccgtacaattatattttctaaatgaaaatcatcgtgttgaaatcgattcgggcggctctttaaatatatttcattttcttctataaactttatgattttatcatcattttttatttttattccgcatgttttgtatacctctacatatttactatgttttttcatagctctttcataccatggaagtatatccttaggagcttcaaatgtatgcatttttgctaaatcttttcctgcctctataccaatatcatattgttcttttggtgaatacgtaggcaatagcttcttcgcatcttccccttctaaatatgaaaaaatactatagcatacaccttcttcttccaatatacctatttcaattggcctttgtgcctgtacgttacgttttaccatttcatttaaaatttgaaactctattttctttctttcatactcttttatatcgcctgtccgaaataaatatttttcattatttgcattcgtaattacatatttcttatctggagagaaacctttagaaatttcttcaatattcgctgcatcttttactatttgtatattgctttgccgtgctgtaattatcttcatatctattccccttacatttctgcatttggtgtataggcaacttctacaataaatccattcggatcgtaaaaatcaatcgtatagtaaccttccgaataatgattcatttcaattggaccacgtattaccttcactttcgtactagaaagaaaatctgctacttcatcaactacttctctatgaatagcttgataacaaatatgtctaggccctaacgtccttacaatttcctcatctacttctttaaagtatatttcactttctcctgtgctatatgctatttcatttaactttctccacccaattatggaaaacaacttattataaaaagaaatggactcctctaaatttgctacccaaaattcaatatgatgaatgcctgctcgcagtgtattcatattaagaatacgctccttgtactacttgcacaatttccatcggcttatgaaccatgtaatctggtgcatcttttttcactgtttcaataacatcatatccccaagatacccaaattacgttcactccagcctttttacacgctgctacgtctcgctgttcatcaccgacatataacatatctttctctgttattttttttgatttcaaaaatctttttatcattttatctttaccgaacaaatttttagaacaatacacttcttgtatattttctatatcattcttttgtaaaaacgcccgaatatgctcttctgagttcgatgatatgactgcaattccgtagccttttttatgtagttcatctaatacttctttcatcccatggaacaaaacgagattttttatagccggctgatataatttataaaattccaacgctaatatcggtaatttatacagtggtacattaagttgtttacatctctctggcatcgttaatttacgtaaatgttcaatttcgtcttcctttactgctttatacccatgtttttcagcaagttgattataaatcggtacaaatatattttgtgagtctactaatgtgccatcaaagtcaaaaacaatatatttttgcattcccatactccctttgcttcttttttctaaacctatgttattcaacaacatagttgtctgtcccttctataaaaataaaaaagaacaagattttctcttgttctttttaagaaagccatttcggcggtacattcgtattccaataaatatttcctaactcatgatgtccagagtatccatcatcaaaacggtggtaatggaaattaaaataataaccatcttgcggtggatgatctcttcttacatggaaacgcaataaatcatttcctgatttcgtatcgtagacatgaaaaatcttttcattattcccaccagctggtttttgagaaatcgctaatgattgtagtgaatcttctggtacatcactagcaagctcagcaattgcctcttcaattttcggtaatattacatctttaaactcatcttcaattactggaccaattttagtaccaaacttttgcatcgactgcttctctgcttcttgcattgcataagtaataaaagtatcggtggttaacctgtcattcgcttcttcatatgtgtaggacgtgctctccaaactttgttgcccagctgtgctcgtaggcttgtccgcagctttggcattatcaagtaatatggaaggaggcgtcactaaaccaaatgtaaacacggtaattagtgcgactaaggtttttctaaaccaatttggcatttatgttccctcccctttcactcattattttttatataacggtggtttcttctattatacaaaatgattgtaattattgcactttacaattttgttaacgttcacatatttttcacttgaatatgaaattgtaagatttcatacaataaaaatacaacaaaaataaggaggcgatcagatgactttagatgtcatgtattccgccgcaagtatactcgttttagtatattttatttatcaatgtgttacagactagaaaaagagccatcaatggctcttttttaatggtagaaatacaatccatacaatcaataaaataaaaacaatgccaccaatcacagctggcaataaataaaaccgggaaagtataactattccatataaaagtattgctggtagtagtaaataacgatctgccttccatcttaacaatagtaatttcccttcatcacaatatacacgaagaaacatcttattcgtaaattcagtccaataatcacgtgcatagcgagaaattgcaactacagcaaatacgagaacaatagccgcaatccaccttggagtcataattatacttacagtactgatacatacaatttgaatataaaatattcgtgcagtacttgtacggaaaaattctttcaaaaaagattcgacaatacgagaatcagcttttttccctaaaagtcttttagagcgaggaaatatccacggttttttattcgaactactcggtttagccgcatgaccaccaacttgcataattccgctcgtccagcgcatgctttcctccttttctttctcgatttctttaaaaaagaactttttataattcattttctcttttactaatacactacttaagaaaattactagaccgataaataaaattgaatacaatggatttttataaataaaaaataaactaattccaaaaaaggacacgctcatagaaaatactacattttttacaatccataaaacccatcgtttccccacatgtacatgaataaatctcgttaacaacgacaacataaatcgaaatatagtaaagaatacccaaaataataggacttgtatccctgttacttcgatactttccatcaacaccggtaacataataacgactacaattatattcgttatcgctattcgaacaaatgtgtacatcatgccatactggactaattttcgcatatgtgttgcatacgaaattaaaaataaactatccgcttgctcaaaaaatgaacgaactcctcttccatatgtaatcacataaaatgcgagtaatcctaatccgaaataaatcgtctcttccgttgataattcatttatccatagcgatcgataatagattcccataaatataagtgctggaataataatatataatgcgactgtccaatctgttaccgaacgtatagacttccatttccgctcaagttcatggcgtaatctcttataaaattgttgtttaatcatgttgttcacgccttacaattacatcaaagcagtctaataatgaactacccggcatttccgctaatatttgaatagattctaaatgtccatctgcgactaatgtaccttgtgaaatgagtaaaaatctttcacaaattttttcagcagtatctaatacgtgcgtacaaaataaaattcctgccccgcgctctttttctttatataaataatttaaaaactctttcgtagctaccggatctaaaccgataaaaggttcgtcaatgatataaaaatctggctcagttaaaaacgccaatattagcatcgatttttgtttcatgccttttgaaaattttgataaatactcatgtttatgcttattcattcgaaaagtatgtaataattgttccgctcgttcttcccaacttcccatttcacttccacgagctgccattaataattcaatatgttcccagagcgtcaagtaatcatagtatgttggatgttctggtacgtatgcatacggatttttcttttcaccgaatgatatttcaccgtccatatttacaagtaatccgagtatcgttttaatcgtcgtactcttcccagcaccatttgctccaataagagcaactagttcacctttttcgatagaaaaagctatatcatgaattattttttcgcctatttcatatccagctgagcggatatttacttttaacatgcattccccttctttccatttctaatacaatcaaggaaaagaataacatataactatctatatatcattataaaatatttattttcatagcaggaaaaaacattttttaacagaatattaaatgtttgattacattttattggagtggataatatgtcttttcaaattcgtgaagcaacgatagatgatatagacgcactttgttctttaacgaaagaattaaaaggttcctctatttcctatgaagatatgaacaaccgattacaattcgtacaaatgagtccgtttgattttttatatgtttacgaggaagaagaagctatatttgggttacttggatttcgtatacgtgaaaatttagaagatgtaacacgttatggagagatttcaattattagcgttgattctaacatacgacggaaaggcattggacaagtgttgatggattatgccgagcaattagcaaagaaacataattgcattggcacatggctagttagtggaacaaaaagagtagaagctcatcctttttacaaaaaattaggatatgaagtaaatggctacagatttgtaaaacatttttaaactacttataaattgaagggactataactatgacaaacattaaagcaattttcattgatcgtgacggtacaattggtggtgacactacaatacattatccgggatcttttacattatttccgtttacaaaagcagctttgcaaaaactaaaagctcaaaatataaaaattttctctttcacaaatcaacctggtatcgcagatggaattgcaactgtagccgattttgtacaagaattagaaggcttcggttttgatgatatttatgtatgtcctcacaaacacggtgatggttgtgaatgtcgtaaaccaagtacaggtatgctgctacaagcagctgaaaaacacgggcttgatttaacaaaatgcgctgtaattggtgatcgctggaccgatatcgttgcaggagcaacagtgcatgcgataacgatattggtgcgcacaggcgctggatacgatgctttacatacgtaccgagacaaatgggcacatattgaaccaaactacattgcagataactttgaagatgcaacaaactgggttttaaatcaactataatacaaatgaaaattttgattcacccgaaataatttaaaacatagttaaaatagcctttttggcaaataattgtattccacaaaacggatcacctcaaaaggtagcaagttcccttttgatacgcaaacattgcaattcaaattatattttttattagtaacagcaattaacgtaaagaaggaatagcttagtggctatcccttctttattgacttctattatttacatttgttatctgtttttattgagtattctcatcgtttttatactccaaaatatcccctggctgacactccaaagctttacatatcgcttctaatgttgaaaaacgaaccgcttttgctttcccatttttcaaaatagaaagattcgccatcgtaattccaaccttctccgaaagctccgttacactcatttttcgttttgctaacatgacgtcaatattaataatgattgtcatatccgccacctcagaccgtcaaatcattttctgattttatgttaattgcctcttgtagaagtcgttggaggatagcagcaaaaacggcgataacgagcgaagcaaaaacgataatgagtcccactaacccaataggagggtccatttttttcgctataaaatgaaaaagtggcaaacttaatacatacaaaccactgattgtaattgcacagcgctttatattctttaacgcctttactgataattccgagaacgctgtgttctcatcaatgtactgtaaaagattgaaagcctgataaagagcaacgtaaaaaggcacagctgctacatacagtacaattaaaacaagatattttatcggagcaatgttaggatacaaattcgctgtgaaatccgccatttccggcactaaaaatatgcataaagcaagcactgaaattccagcaagaaaaataattacttttaagaacattgttgaacttcgtttaagattcatttacaatacctcacttatttaatggcaacataattttatcacaacatttattgtttaacaataaataaatatcgttttattttcgtcatgttttttaatttaggcaaaaataaaaaagaatttctcattacaaagaaattctttttcttgaaaatgtctctttcaacttaattttttaaaacgttaattcgtaatggaaataacgattatctctcaaataaccattttcagcgtataatcgttgtgctgataaattatcaatctccgtttgcagctttacaccttttgctccattttctaatgcgtattctttagcagcttctaataattttttacctgttccggctccacgcttcgccgcttgtacaaataaatcatttaaaatccataattctttcattgaaatagaagaaaatgatggatatagttgcgtgaacccaatatattcgccgtcttcaactgctacgaaaataacagactcttttttctcaattctatttcgtaaaaatacttttgccccttctaaatcagaatcttgcctataaaacatgcgatagttattaaaaactgatgctagtccatctaaatctgcaattgttgcctcatatattctcattttactccattccccttccaatactgtctcattatatccgttgcccatttaggctggtgtatttcttctgtcggcataaactctttcattattggttttatatccaatataggagtgccatcaatagcatctaatccctcaacaataattgatttaccttctcttttgatcatctttacaattgttacacctatgcgatttgggcgatttttcccgcgctgtgcaaaaatacctacttcaggataatccttattatttctaggatgtctagcaaaatactgaatttgctcgtcagttactttatgaaaataaaaaacaacttcaatatgagaaaaatcttcaaccccttgtatactctcttctgcatacatttcagttaaagttatacgagatcttacttctccccactcatcatcttttatttcctttctttcattatgtacaaatgcgattggttgaactgaaaacatacgcattcccccttaaatgtaaccacttacattataaaatattttctgaatgttttccagatatacgaataaagtttacataatataattatactctatctagagctaccttgactgcttcaattgcatgtatatgagttgtatcaaatatcgggacagatacgttttcttgctttattaataaccctatttctgtacaacctaatatgattccctgtgctcctttttgcactaactcttcgatgcctcttttataatattctctagattgagatactatttttcctaaacataattctgtatatattactttatttatttcttttctatttttttctgatggtactattacttttatattattttcttctatacgtgacttatagaaatcttgctccattgtatatttagttccaagcagaccaaccttttgaatgtcttttcttttaatttcttttgcagttgcatcagcaatatgtaagactggaatatcaattttggcctttatttttccaactaccttatgcattgtatttgtacaaatgattataaagtctgctcctcccttttgtaatgaatatgccgcattccctagaatttctccagcaccatcccaatctccgctagactgacatcgttcaatctcttcaaaatccacactattaatcaaacattttgctgaatgtagccctcctaatctctcttttatttcttcattaataattcgataatattcagaagttgattcccaactcataccacctataagacctatcgttttcatataaacacctacctaaacttttttataaaactaataacaacgttttattatgtatattatacacaataaaacaagactttaagtttgggatataaagtcttgttttaacgtaataatatagaataattgtactttcatttccaaggaaatttttatagaatattctgaaattaataatctgatatttttataaattctttatacttataattaaaacactctcgatacaactctttgatttcatcatatgatggaacacgtgggttattagctgggctaccactttcaattgcatctgatgccattttagagatagcattttcaaattcaatttcatcgataccgtattcttttaaatttggaatacgaagatcatagcaaagcttttttatttccccaatcgtgtagtctgctacttcctcatcagaattcgaatacaaatccttatttaagttacgtccaatttttgctaaccttttcactgcacttgtttttgtaaactctaacactgtaggtaatagtatggcatttgatattccatgcggtacatgaaataatgctcccactggccttgacattccatgaactaatgtaactgatgcattcgaaaatgcaattccagcttgtaaggaagcaatcatcatcgcttctcttgcctccatattatgtccatcttcatatgctatacgtaaatatttcataatactttcaatagctgaaagagcaagtacatctgtaagtggttgtgaaaatttagaaatataagcttcaatcgcatgacataacgcatctattcctgttgctgccgtaatttgtggtggtaacgaacttgtcaaaactggatctataattgctactttcggtataaaactaggatgcttcatcatcatttttacatctgtttttttattcgtaattactgctacacttgtaacttccgaaccagtaccagaagttgttggaattgcaataagtggtagtggattgttttctatttcaatatccttttggacataatcctcaacttctccaccatttgtatataaaaccgctaccgctttcgcagcatcaatacaacttccaccaccaataccgataataaaatcgcacttttcctctttacaaagagataacgcttctaatacgtgtatatttgtaggctcagcatccactttattatatgtactaacaataatacctttcttatttagttgttgcatacacttttcaacatatcctaatttctccataattgtatcagtaactataaaagctcttttccctaacttttttgattgttctcccagtttttcaagcgaattccttccatataataccgactttggcatacgaaactcagaaacctcttgcaagtcccccaccccttcttatcctaattaatattttataatataaattatcgatttgatgaatctttacgattcaaattttttaatagagtcctgttaaagtatagaatgcgataactaaaaatacagcaaccgttttcaaaatagtaatagcaaatatatctttatatgactgtttatgtgttaatcccgttactgtaagaatagtaataatagccccgttatgtggtagtgtatccattcctcctgatgccattgatacgatacggtgcataacttctaatggaatatcaaattgattggccgctgcaataaatttatctcccattgcgcttaatactattcccattcctcctgatgccgagcctgtaattccagctaaaatattcgtcgttactgcaccattcactaacggatttgtgaaagtagcagagatgccatctctcataattgcgaagcctggaagtgctgcaatgacaccaccgaatccaaactcagctcctgtattcatcgttgcaagtagcgctccaccaatacttgtattcaatccagcttggaaacctgttactactcgcttccaatataataataacgttgttaagatccctataataagtgccaattctacagaccaaattcctactactgcacttaattctacttttccaaatgctttcataccaattgcagaaaaatcaaaaccgcttggataccacttcggtatcataatagtaaacactttattcattacacctactaaaataagtggtataaatgcaataagttgttgcgctcttgtgatttcaatgttattaattaatggcatatttttttgttctacttgcaaagatgctgccatttcagtatttccatcattaaaaccaaaatatccttcacctgctgcttttgccttcttacgtctactctctaaatatagtaaacctaatgtaagaacaaaaattgctcctacaatcccaagtatcggtgcagcataaatatccgttttaaaaaatgttgtaggtattacattttgaatttgtggtgatccaggtagcgcatccattgtaaacgttactgctccaagaacaatcgttccagggattaaacgctttggaatattagcttgtcgaaacaacttagctgcgaacggataaacagcaaacactactacatacacactaacaccactatacgttaaaatagcccccattaatacaatcgctaatatagtacgtttttcaccaactaactcaataattgtttttgcgatagaatctgcaattcctgacatttccactacttttccaaatattgctcctaataaaaacacaggaaaatataattttataaatccaaccattttctccataaagatattagaaaagaaaggtaatacataactaggttctgtcaaaaatactgcaaataatgcaaatatcggcgcgaataaaataacagaaaaacctctgtatgctacgaacataagtaaacttagtgctaataatataataactaactctaattttacccctccattaaacagaatattctaaattttattgataaatttctactaaccttttaattctgacatccctcctcttattcatacaaatttttatgctaaaaatgtctaattataattattcgattacatatgaaaaatccctttaaacagaaacgaattcatcgtcatacgttataaagggattgctagaatctatatttactgctgtattaaatttttctctatacaaaaatgatacagttcttcaacatctttcactatgtaggtcgcactaacttcagtcagttctttttcacagccatagccatataaaacaccaattgaagcaattccattctgatttgcacctattatatcgtgctttctatcaccaatcattatcatttcttctttatttagttcttcatgtgtttgtaaaatatgagcaattatttcttctttttttattctcgtaccatctaaattacttccaatgatgtcttcgaaataattcgttaattgaaaatgctctataacttgtttcgcaaatacagtgggctttgaagttgctacgaatatgcgattccctgaactttttaattgttgcaagagcttcagaatcccctcttatacattattttcaaacaatccacgctgctttaaatactcacggaagtaaaaaacagcacgttcaacctctccttcactcatattatatctctctatgaatgattgctgaataggaggacctataaatgaatctaactcacttatatgtacttcttcaattcctactttttttaatgcatataaaaccgagtttacaatcccttctttcggatcagttaaagttccatctaaatcaaatagaaatattttatacatgcttcattcctccacttaatttgctgtataaataagtgctaacatctcttccacttctccctattatactattattatctattttttcgaaaaatcaatttccctatgtcacatactttcagttacaaaatacgatagatatgatacagtaaaaaagttacaattattttaatagaaactggtgaaacaaatgtcaattacgttaatttttataatggctttcacaattgtgatccacgcagttgaaacaagctcttatagtattcgattagctggagtacgtttaaagaagattgcggttgccttgtctgttgtaggaatggtgttacttatttcaagaacatcaaacttactacaagcctttttaatcggtggtattgtcgatgaagcaaaactagattcttctattaatttagagcatattatacgactcgtactattatcggcttctatcggtactttaatcgcgatcattctttatccaactttgacaaaattatttggatatgtcattcaaaactttgaaacagacggttctttcattcgaatgatgaaaacgaataacattcaaaaattaaagtacacaaaaaaatatgtccgttttccaaagttagaaatgattcatagactgcgtatcggtggtattccaaagcgtattatgcttattaacatgtttgctactgctatttatacagcaggggtactttcagccctttacgcttcttttttaaatccagattatgcaacaaatgcaagtacagcttctggccttgtaaatggtttcgccactattttattaactgtattactcgatccacgcattgctcttttaacagaacgtgctctacaatcagaaagcggtgctgaatctatgagtaaaatgtatggttggctaatgatttctagacttctcggcacattattagcacaactgctatttgtaccaggtgcttactggattttatggattattgaactgatgcattaatttactagaaaggtgaatttatcaatgaagatcaaaacagagaaagatataattcgcttaatagaaaacgacgaatggatgatgaatgtattacaaatggcaaaattactagagctacctgattggtggatttgtgccggatttgttcgttctaaaatttgggatactttacatgactatgaagctaaaacggctatgcctgatgttgatgtgatttattatgatagtctacatcaagatgagatatacgaacaatcattagaaacgaaattaatgaatattgatgctactatcccttggtctgtaaaaaatcaagctcgtatgcatgtagtgaataatatgccaccatattcttcttctgttaatgctatttctaaattccctgaaacagcaacggctttaggagttacacttgatgaactaaacaacgttatcttaacagccccatgtggtattgaagatgtcctttccttacaagtgaaaccaacagctcattttcttgaatcgaaagaacgattacatatgtacaaaaacagagttataaaaaagaattggcaaagtaagtggcctaacatcacaatcacatatccagaaatttagaaagggtgcctctcatttatagaagcacccttttcttcatttcaaaaaatgtatgactgtttctgcaaatctatctgcttcctcataatgaggtgaatgaccgctctcttcaaatacgatatacttgccgtttcgggcatctttattaaatgttttaatttgttcttcacacgttactacatcatgttttcctactattaataacattagattttgtacatcttttatttttgataataatgatgtatgacatgctccctctaattttaatctatcaaagtgaattttggagcgatttgaaaatatttcccactcttcatcactgtataaactctcatctgtcctattttccttattattgtaaatctccattcttttttcttctaattcagcgcttagtcttatataagcttctaacaactcttctgaactagcatcgctagatgaataagcaaagcattcttttgctatttcttcttttccatacttttttaataaatgtcctgtcttttgtaacaaagccctacttgttaatgcaaaattaaaagttggtccttcaaatattattttctctattgaacttggatatatcgacgcataaagcaatgctacatatccaccgaaagagtgtccaattatagaccacttctcaatttgtaatactttttttaattcctcacagtcttcaatcaaatcatttaatccaaaagcttcgtcttcagttatttcttctgagcgacaaacacctctttgatctattataattacatatagagaatcttttaaacgttccgcttgatgaaatgaaaaatcataacaactttctcctggtccaccatgcaagtataagactggcttatttttaggatttccatgtgtttcaacgtatagctttttccctctaatattcatgtatttccctgcttctatcaaattttcctttataatcaccacccccctttttttactgaatattataacatttaatattaaataattcctattacatttaagaagacgataattattgcaagtggtgctacaaatcgaagtaaaaatgcccaacaagtaaatactttctttccataatttccacctacaaaaaactctgcttctagtaccttcttctccattttgaatgaaacgaaaatactaataaatagtgctccaagtggcattaatatattactagataaaaagtctactgcatcaaaaatattctttccgaaaatcgtaatatcactccatactccaaatgataacgctgatggtatacctaccaagaaaatgccgaaaccgatcatccatgataatttcgttctcttttcttgttcaccatttgctaatgctgaaacaacagtttctagtagagaaaatgctgatgttaatgtcgcaaatgtaaatagtgcaagaaatactgttaagaaaaatccaccgaatgggatttgactaaatacagatggtaatacgataaatagtaatccaggtccttctgttggctccattcctaatgaaaatacggctggaaaaatagcaagacctgcaaataatgaaacaaataaatttaatccaacaattgttattgctgattttggtaaactttcttttttatttaaataggaactatacgtaaccataattgaaatcccgatactaattgcaaagaatgattgccccattgcgaacaaaatactttccgaagtaatctttgagaaatctggttgtaagaaaaacttcacacctttcattgcatcatcaagtgttaacgaacgaataataagagcgacaaataaaacgaacaatgctggcaacatatatttacttgctttttcaattccgttttgtacaccctttgatacaacccatatcgtaatgaacataaaagcgaaatgtcccataatagcccaagcaggattcccaattgtttcagtaaataatgtaccgtaattttgtcctggagtaatcagttgtccagttattcctctgaataaataaattaatacccatccacctacaacactataaaacgaaagtagtataaaacaagttccaacaccaaggcgtccaatccaatgccatcccgtatttggtgcgatgcttttaaatgctccaactgcttgtttctgcgtactgcgtccaatcataaattcagctataagtagcggtagtccaattaaaacagtaaataatataaatattaaaaagaacgctcctcccccactcttcccagcgatataagggaacttccatatcgcaccaagtccaattgctgatccggctgccgccattataaaacctaatttcgaagtccattgctccgtctgtttcatctcattttcctcctaattaaatctttttatataaataaataaattttataaacctattcaaataaaccctccatttcttcttccatataataaaaaaatggcctagcatctctatataaagagacgctaagccatttacttaacgcggtaccacccttattgattccattatgaatccaccttagtagtaatcgtttgattacaaacctaatatcgaaggttaaccgttaagatttactaagaatgtaattccgttccaccttactgctcctaggcgagttcaggatgttatttgactatgtcacaccaacccatagctctctgtacaaatacatgaccttactactcctattcaacacattttaatatttagaatatattttcttttgaaattaatatgaagtatatctgttatatttgtaactgtcaagggtatattgatttttttgtcgaaatggttcatatttcaactgacttttactaagcttattagaaaaagaaagagtctatattttcaccttttcaaacgaactataaaaaaagaatcttcgcgataatcgcgaagattctttttacggtatgagacgagtacaatctctcggaaaagcactcgcctctcgtacatttgttaattctaaaagtttatatacaaccctttctaacccaattccgaaacctccatgtggtggacaaccatatcgaaatgtatttaaataagattgaaatttatctgggtgtaatcctttttctttaaacgaagcgagtaacatttcataattatgaattcgctgtgcccctgacgttatttctaatcctttatataataagtcgaatgaatcagtaatagctggattctctttattcggcatcgtatacatcggtctcgcttttttcggataatgcgtaatgaaaacaaattcactattatatatttccttcacatatttccctagtaacttttcaccttctgtatctaaatcccctacaggagattctttacgatacttacttttcaaaatttcttgtgcttctaacaatgtaattttaggtatttcagtaataacaggtacttctatttgtaatagttgtagttctatttcacattttttcgctacttgttgaaacatatatcgtaaaacatccgtttctagttgcatcacttcataaaaatcatgaataaaaccaagctctacgtctaacgatatatattcattcaaatgacgggaagaattatgatgttccgctctatatacaggtgcaatttcaaaaactcgttctaacccacctgccaccatcatttgcttatagaactgtggtgattgtgctaaataagcttctttttggaagtatggaagcttaaaaacatttgctcctccttctgccccttgcgaaacaattttcggcgtaaagatccgtgtgaaatcgttctctataagaaattcactaaagctttgaacgagtgtagatttcactttaaaaatcgctgcggttcgctcatgccttaatgatattactcgctcattaagtagttgatctaagccaacttgtaacttctttttatttatttcaaatggaagtggctctgcactgtttattactttcacttcatgagcaagtacttcaacacccaattctgttttcgatgtctcgactatttcaccaattacgtggacgacactttctacatcaactttatatccagccaattcattttctaatacacattgaattactcctgttctgtcccgtaataataaaaaactaacatttccaagatgtcgaatcttttttacccatccttgaagtaatacaacctttccactttgctttttacattcttttgtgagtgaacgcttcattattgaatccattatttttccctccagtaattttatatttatttacgttattgttgtcatcgtcatcatccacggtcactcaccccctttcaaagaatacaaaaatccgcccctataaatagggacggatttttttccgcggtaccacccaaattgtcatactgaccatcttagccctgataacggtaggtaccgtttgcttttactaataatcacgttcaaagcaacactcacaggtgtctttccatcatgcggtatcgcaacctttccagcaactggctgctctctgtagacctttgcaccatgtacttttcctgatcatcactttttatatttacagagtattctaactccttatcttataaaacgcaagctttttttgaaacattctggttttataactcctaacttcttctaaagtgtgaaaagttaattttgtaatacatattcttatgtattacatccaaaattacacctttaatattttccaatttttacataaaaactaattcatttacgcatattaataaaaattttaaagcgaggtgtgtatatgcaaaaagcaattagtttctttctccttttgttttgcttaattgtagtaaacgaaacgtatgcctattcaccaaaatctttaccaatctctcaaaactctgatcaatggcaagtgaatattgataaaccgaaaaaaacaaacaagaatatgcttcaagctaaaaaagatgaatttcaaacatatcatttttcagtaaagaatgtcgggaatagtgaagtatataatgtaaacgtcgaagtattccgcaacgaaccaaataagaaaacgaaatatgaactcttttccctaaaggaaagtcgtttggcaagtggaaaaactggatttgaacacgctaatttacccgttgctacaaaagcagatgaagttgatgttattattacatggcaagaacacccattccgatcgatgcgaaatggtcaaaaagttgaatctagaaaatttaaagagcattttgtttttaaagaagctaaaaagtaaatgggatacggatatattcacactatcattgatatagctttatttactagtaccagttcttaagcaaattaaaaagtcgtggcttataatgaagtgcaccccaattgttagacacagtctaacaattggaggtgcattttttatcctttgataactaaaaattcttttgtttttcagttgacatactaccgcaggtcttaaaatgtagtataatcattttaccacaaaacacgaacgatggctaaattttttaagtataatgttcgtgttatatagttgtctagatgattggttatgtaaattcaatttgccatttgaaataacattccgtaagatgagagatagagtatatttagagctggaggaaagaaagtggaatttgtatttttaggaactggtgcaggtgttccttcaaaaggaaggaacgtttcagcaattgctttacaattgttagaagaacgaggacaaacttggttatttgattgtggcgaggccacgcaacatcaaatattacatacatctgtacgtccgcgccgcattgaaaaaatatttattacgcatttacatggcgatcatatttttggattgcctggtttattaggtagccgttcatttcaaggaggaactacgcctttaacggtgtatggaccgaaaggaattaaacaatttattgaagtggcattatcggtaagtacgacacatgtgaaatatccacttgaagttgtggagataacagaagaaggtaccgtatttgaagataatgaattttatgtagaaacgaaaagattgtcacacggtatagaatgttttggatatcgtattgtagagagagatatacaaggtgctcttttagttgataagttgcttgagatgggtgtgaaaccaggtccaatctttaaacgtttaaaagatggtgaagcagttgaattagaggatggcacgatattaaatggaaatgagtttatcggcccacctcaaaaaggaagaattattactatcttaggtgatacgcgatattgcgaagcgagtagggagcttgcgcaagatgcagatgtacttgtccatgaagcgactttcgcagcagaagatgagcaacaagcgtatgattattttcattctacatctaagcaagctgcgagcattgcacttcaggcaaatgcgaagcgactaatattaactcacattagttctcgctatcaaggagatacatataaggaattattgaaagaggctagagagttgttttctaatacagaaatagcgacggatttgaaatcattcccagtagaaaaatgataattttataaaaaatggtaacggcgggttaccatttttttttgtctaaaaaaatttaaaaataaaactgttattattttatacttatacttggatgatacagaaaattaggatggtttgaatatataggataaaaatacgaaataatgattatttagaaaaactgttatataagtcagatgacatacaagtgatacaaatagcagaaatggacttttattcagaacttttaaaattcaacaaaagtaagcgttttataaaaaacaagctataatgagggcagattataatttatgataagtcacatgtattttagtcattatcgtaacaagtgaagttgactaaatcatgagagagtaacacgagaattataataggaaagatattactattatttgtcataagtctttttcactttttagctaaacgatatgattagcgagtgtatctattgcaagttccttagttgaagctttttattaataaggtggtggagatttaattggtaggtataccactctttaaaagagttcagaacatcagcaggtagtctaggtggaatagcgggtgcaaatttagttgcattagcaatggttatatcacttgtttatgctatgcttgcaatggcttctgtgttaaactttggattgctaccagactttattgtggattatcttgtatcatttttaaatgaaaataatgctaagattcttatgtattatgataactggtgttatttcaggttatattggattacttttattcaaaaactatccaattcgtatagcagaacaaattcgtggtacaactggaaaagcgacagatgtagcagcttaatagaatagtagaataaatttttttcatagaggtttagggggagttatgatgaagtatcgctcagtatttgatattatcggtccagttatgattggaccatcaagttcacatacagcaggcgcggcaagaatggggcaagttgctcgccagctgtttcgtcatgaaccagaaagagtaagcatttcgttatatggatcatttgcaaagacgtatcgagggcatggtacggatgtagcactaatcggtggaatattaggatttgaaacagatgacttacgtattccagaggcgctagaaatagcaaaagagcgcgaaattgaagtggaattcattgaagaagatgccaatgcacctcatccaaatacagcgagaattcgtttgtataaaggtgaagatgaaattgaagttgttgcttgctcaattggtggcggtaaaattgaagttgtagaattaaacggattcgatcttcaattatcaggcacgagcccagcactacttattgtaaataacgatcgctttggtgctattgcagcggtagcttcaatccttgcgaaacatgagattaacattagtacgatgagtgtatctcgtaaagaaaaaggaagaagagcgcttatggtcatcgaaacagatgaattattagcagatgaagtaattgaagaaataaaagcgcaacaaaatatttgtcaagtaactattatggaataattgcaggggggacacaccatgtttcggaacgcagcggaactagtggcgcaagctaaagaacaaaatgtaaaaatcgcagaaattatgattcaatgtgaaatggaaacaagaagtatttcacgtgaagaagtaattgctggtatggaaaagaacttagtagtgatggagcaagcagtagaacgtggtattcgcggcgtgaaatcaccaactggtttaactggtggagatgctgtaaaagttcaagcgtatatgaagagtggaaaaggcttatctggagatacgattttggatgcagtaagcaaagctgtggcaacaaatgaagtaaacgcagcgatgggaattatttgtgcaacaccaacagcagggtctgctggaacagtgccaggtgtactatttgcactaagagaaaaattgcagcctacacgtgaagaaatgattgaattcttatttacagcaggagctttcggtatggttgttgcgaataacgcttgtatttctggtgcggcaggaggatgccaagctgaagttggttcagcaagtggaatggcggctgcagctgcagttgagatggctggtggaacacaagatcaagcagctacagcaatggcaatttcattaaagaacatgcttggtttagtgtgtgatcctgttgcaggacttgtagaagtaccttgtgtaaaacgtaatgcagcaggagctgcaaatgcgatgatctcagcagatttagcattagctggtgtaacgagtacaattccatgtgatgaagtaattgaggcaatgtttagaatcggacaaacgatgccagtagcacttcgtgaaacagcagaaggtggacttgcagcaacgccaactggtcgtcgcctgcaagaagagatttttgggaagaacaataactaagtgtaaattatagaaaaaggagctcaaataaacttgagctcctttttctatttttcttttgttagttgttctaatgtttttccaagattatgtgatcgtttcgttgcctgtgtaatacaagaaacaagtgcttgttgaaatttatgttcttgtaatacttcaatacctgcctcagtagttccaccaggagaagtaatttcctttcgcaaaatagaagggtgtttgtcacttgcttttaacatttcagcagcaccaatcatcgtttgaagaataagtgattttgcaatatcttcttttaaaccaatttttgttgcagcttcttccatagcttccactacgtaataaatataagcaggtccacttccggataatgcagtgacagcatgcatatcttcttcctctacaacagagacgagaccaatcgtttcaaataaagatgttgcagtgtgaatatgttccgctgttgcatgttttgaaggggagatagcggtagctgattttaaaatggctgcggatgtatttggcattgcacgaataattggaacgtctttttgaagtagttttctaattgagtgagtagaaacacctgctagtaatgaaataataagcacgttattatttatgtattctttaaaaggggtaagcgcctctgcaacatcctttggtttcattgctagaaaaagaatatttgcatcagtaagtaattcttttttattatgagtacctttgacaccgtattttttatgtagctcttgtaatcttgtctcgttagaacgattacttacagtaatttgttcacctttaacgacatttgcatgtaacaagccaccaataatagcttcggcaatagagcctgcaccgagaaaggaaatgttttgaatagacatgatgttcctcctttaattttggttagaaattcttataaatgtacatacattcgtttttttataggaaacacctctttttatctgaaaataatgacaaatatatatagaagttgtaaactgaagaagtattcatttttgaaccggaaagagacaggggggctaagcatgacggcgattcaccgaatggagattcctgtaccatttgcagtggaaactgtgaatgtgtttttagttgagggggagacattaacattaattgatacagggacgaatacagaagaggcaaggaatgcgttagaaagtcaattaggtgcattaggacatacgatagaagatattgaaacagtagtcattacgcatcatcatgcagatcattgtggacttttaaatatattttctgagaagacgaatattattggacatccttggaatgagccttggatcacacaaaatccagaatttttaaagcggtatcatgaattttttagagagacggccttacagtttggtgtgccagcagcatttttgaaagacgagtcgttattgacgacgaggacacttaaatattcttgtaatagatcgttaacgcatactgtgagagaaggagatcgtattgattctttgcctggatttatagtacttgaaacaccaggtcatgcttctactcatatttctttatatagagaatctgatggaatattaattggtggagatgctctcatcagtcatatttcttcgaatccaatactagaaccaccatatgaagggcaaacagaacgggcacgcccattactacaatataatcaaacattacagcgtttaagcgaaatgaatatttcacgcattttatcagggcatggggaagatgttctaaatgtgaaacaacttattgaaacgagattacaaaagcaagaaacacgtgcttttaaagtgcttgagttattaaaggaaaaaccaatgacagcatttgaagtatgtgtaaaactatttccggtattatataaagaacaattaccacttactatttcagaaacggttggacaattggactatttagcatataatcaacaagtgatgattgatgaatcatcgcaacaattgatttattatgcaaagtaggtgacagcaatgacaggacgtttacaaaataaagtaatcgtcattacaggtgcttctagtgggattggtgagcaagttgcaatgcaagttgcagcacagggagcgactcccgtattaatggctcgaacagaagagaaactacaagcgttagtagacaaaattaaagaaacttataatacgccttgctattattatgtattagatgtaagtgaagagatggaagtacagtctgttttttcaaaggtattacaagaagtaggacgtattgatatattagtaaacaatgcgggatttggtatttttaaaacgtttgaagatgcgtcaatggatgaagtaaaagatatgttccaagtaaatgtatttggattagtagcatgtacgaaagcggtactaccttatatggtaaacaagaacgaaggacatattattaatattgcttcccttgccggaaaaattgcaactccgaaatcaagtgcgtatgcagcaacgaaacatgctgtattaggatttacgaatagtttacgcatggaattagcgaatacagatatttatgttacagcaattaatccaggtccgatagatacaaacttttttgaaatagcggatcaatctggtacctatgtaaagaatatgggacgttacatgttaaaaccaacatacgtagcagaacaaatcgtaaagtcgatgcacacgaaaaaacgtgaagtaaacttaccgaagtggatgggaattggaccgaaactttatgctttattcccaggtttatttgaacgtgtagcaggtaaatcattaagtaaaaaataggaggtttccatatggaaatctcctatttttttattttccagtcacataatcgtaaacgatatcctcaactgcctcgtatacatcaatttcagtatttgaatgaattatcgtttgaatatgtttaattagcatttcctgatcttcttttgatattggactgcattgatattgctgaaaactttttataatcattttctcaattaatttttcgttcatattttttcccgcctgtatgtacgtatgtattgttttattgtacttgaagtgaaataaaaaaactaccatgcactatttttgtataaaaattcggttgtgtgtaatgtttttctagtaaaattaagtttttttacttttaaaaatttataaatatttaattgactctataaatatacaatattataatcatacttaatttaaagaatcgatttgaggaggaacttatgaaagtcgcaattattggagccactggatatgggggcattgagttaattcgtttattagaacaacatccatatttttctatagcatctcttcattctttttcacaagttggtgagtgtataacaaatgtatatccgcatcttcgaaatgtcctcgttcatacgttacaagaaattgatgtggagacaatagggaaagaagcagaaatcgtatttctagcaacaccagcaggagtatcggcggagttaactcccaagttattagcagaaggtttaaaagtaattgacctatctggagactttcgtatgatagatccttcgtcatatgaactgtggtataaaaggccagcagcgaaagaagaaattcttagaaaagcagtgtatgggttaagtgaatggaaaaggactaagattcaaaaggcaaatttaattgcaaacccaggatgttttgctacagccacattgctagcgatagcaccgttagtacgtagtagcaggattgaagaagattcgattattattgacgcgaaatcaggggtatcaggagcaggtaaaacaccaacaacaatgactcattttcctgagctatacgataacttacacatctataaagtaaaccagcatcagcacgttccagagattgagcaaatgcttacagaatggaatagtgagttacagccaattacatttagcacacatttaataccgatatcacgaggaatcatgattacactttatgcaaaagtaaaacaaaagatggaaataaagcaacttcaaaaattgtatgaagaaacgtatgaacaatcgcctttcatccgaatttgtacgcaagggaaatttccaagtccaaaagaagtgagaggctcaaattattgtgatattggcatagcttacgatgaaagaacagaaatagttacggtcgtttctgttatagacaatatgatgaaaggcgcggctgggcaagcgattcaaaatgcaaacataatagcgggactagaagagacaacaggtttacaacatatgccgctttatctataagggggacatgatgattaaagtagcgtctattacaaaattagaaaatggttcaattgtaacgccgaaaggcttttcggcaattggtactgcaaatggtctgaaaaaggatttaggggcaatcgtttgtgacgtaccagcatcatgtgccgctgtgtatacaacgaatcaaatacaagcagcccctttgcaagtaacgaaggatagtataacggcagaagggaagttacaagcaattatcgttaatagtggaaatgcaaatgcttgtactggaatgaaaggattacaagacgcatacgagatgcgcacattaggggcggaacattttggattgaaagaaaattacgttgcagtagcttcaacaggtgtaattggtgttccgctaccgatggatataatccgaaagggagttgcaactcttataccgacgaaggaagaaagtgaagcatattctttttctgaagcaattttaacgacggatctcataacgaaagaaacttgctatgaaatgattattgatgggaagaaagtgacgattgcgggtgttgcaaaaggttcagggatgattcatccgaatatggcaacgatgcttagttttattacgacagatgctcatatagagcatgacgtattgcaaacggcattatcccaaattacgaatcatacatttaatcaaattacggtagatggagatacttctacgaatgatatggtcatcgttatggcaagtggattatcagaaacaaggccgataaatatggaacatacagattgggaaactttcgtatgtgctttacagaaggtatgtgaagatttagcaaaaaaaattgcgcaagatggtgaaggcgctacgaagttaatagaagtaaatgtgctaggagctcaaacgaatgaagaggcaaaaaaaattgcaaagcaaatagtcggttcgagtcttgtgaaaacagcaatacatggtgaagacccaaactggggacgaattattagcagtattggacaaagtgaagtagctattagtccgaatacaattgacattactcttcaatctatattggtattaaaaaatagtgagcctcaaacattttctgaagaagaaatgaaagagagattacaagaagatgaaatagtcattaatgtgtacttacacttaggagaagagacaggatcagcttggggctgtgacttaagctatgaatatgtgaaaataaacgcttgttatcgtacataaggagagagaagatgagcgaatatattgtagtgaaatgcggcggtagtatgttgaatcaattaaaagctgtgttttttgaatgtataaagaaattgcaacagaagtataaagtagtgattgttcatggtggtgggccagaaattgatgccaaattaaaagattgtaacatcaacgtagaaaaaagagatggattacgcgtaacaccaaaagaagttatggatgttgttcaaatggtgctatgcggaagtacgaataaaaaactcgtaatgaatttacaaaagcataatttacttgcggtaggttgttcaggatgtgacggcaatttacttcaagttcaacctgtcagtgaagagataggatatgtgggggaagtaagttatgtagaaacagccttattaaaaggattaatgaatatggagtatattcctgttattgctccaatcggggtaaatggtaatgaagtttataacataaatgcggacaatgctgcagctgggattgcggctgcgttaggggcaaaagagcttatttttattacggatgtagatggaatattacatgaagggaatttggtaaaggaaacggatgaatctgaaattgctacttttatagaaacaggtgttattacaggtgggatgattccgaaagtacaggcggcactagcatcattaaaaatgggagtgcaaaagataagtattgtgaatggtacaaaagattttactgaggttacgggagagtgtattggaacgacggtaacgaaaggtgtgagtattgcatgacgagtcatctttttcaaacgtatggcagaagaactattgagtttgtaaagggaactggaacgaaagttattgataataacggtaaggaatatttagatttcacatcaggaattggcgtatgtaatttaggacattgtcaccctactgttctcaaaggtgtacaagagcaacttgatgatatatggcatatatctaacctgtttacaaacagcttgcaagaagaagttgcgtcattattaacagaaaatagagaattagattatgtgtttttctgtaatagtggggcagaggcaaatgaagcggctttaaagttagcacgtaagcatactggaaaatctctcgtcgtaacatgccagcagtcttttcacggtagaacatttggaacgatgagtgcaacgggccaagataaggtaaaagaaggatttggtccattacttccatcttttttacatatcccttttaacgatattaaagcattagaggaagtaatgaatgaagaagttgcggcggtaatggtagaagttgttcaaggagagggaggagtaatacttgctgatctatcttttttgaaagagattgaaacattatgtaataagttcggttccttatttattatagacgaagtacaaacggggataggaagaactggaacactattcgcttatgaacaagtgggaatagagcctgatatcgttaccgttgcaaaggcgcttgggaatgggattcctgtcggagcgatgattggccggaaagagctcggagcgtcgtttactgcaggatcacacggttcaacttttggcgggaattacatcgcgatggctgcagcgaaagaagtattgcaagtaagtgaaaaaccatcgtttttaaaagaagtacaagaaaaaggcgagtacgtattagagaagttgcaagaggaattacagcatgtcgaatgtattcaaaatatacgtggtaaggggcttatgattgggattgagtgtaagcatgaagttgcaagttttatagaacaactagaaaacgaaggacttctcgtattacaagcaggtcctaatgtgataagactattaccgccactcattgtcacgaatgaagagttagaacaggcagtatatataataaaaaaagtagtttgtacaaaaaacgtatcaatcatataagggggaagtttcatgtcaactgtacaagtaccgaaattaaatacgaaagatcttttaacactagaagaattaacgaaagaagaaattatttctttaattgagttcgctatatatttaaaaaagaataagcaagagcctttattacaaggcaaaatattagggcttatttttgataagcattcaactcgtactcgtgtatcttttgaagcaggaatggtacagctcgggggacatggtatgtttttaagtgggaaagagatgcaaatgggaagaggagaaagcgtttcagatactgcgaaagtattatcgcagtatattgacgggatcatgatacgtacattctcacacgcggatgtagaagagcttgcaaaagaatcgagtattcctgttattaacggtttaacggatgatcaccatccttgtcaagcattggcagaccttatgacgatatacgaagaaacaaatacatttaaaggaataaaattggcttacgtaggtgacggaaataatgtatgtcattcattgttgctagcgagtgcaaaagtcggaatgcatatgactgtggcaacgcctgtagggtatgaaccgaatgaagagattgtaaaaaaagcgttagcaattgccaaggaaacaggagctgaaattgaagttttgcatgatcctgaattagcggtgaatgaagcagatttcatttatactgacgtttggatgagcatggggcaagagggcgaagaagagaagtatactttatttcaaccttaccaaatcaataacgaacttgttaagcatgcgaagcaaacatatcgtttcttacactgtttacctgcccatcgtgaagaagaagtaacaggagaaattatagatggaccgcagtctatcgtctttgagcaagctggtaatcgattgcatgctcaaaaagcgttattagtgagtttatttaaaaatgtagaagagccttcctaaaagggaggtttttttatattaaaatgtcggatgtatatttggttaaccatttcgatatcatttataataaaagagaaaactaaatttgtttttcagagtgtgtaaggacatactacatataaaaatatagttaaagagatgatgagggtgaaaacaactaagaaaacatattcgtttttccagcggatgtggagaatattaaagtttcaatattataagttgcttcgatcgccagaaggcgcaaagaaagtatcgttagggtttgctataggattcggcttagaaatgttagtcatttatacggcatcgctcgtatatgtaatattttatccaatcgtcaggttagcaaagggatcttttcctgcggcagttattggcaatattattgggaaaatatcgtttctcccagtatttttatttccgcttgcgtatgcgctaggaaaaatgatttatccatttcatgtacagaaaattcatcatgaaccatttacgatatcggacttgttttcaagtcacatttttacgatattaaagagcttattacaaagtgaagtgtatgtattaattggaatgacgattttaggagttgtgtttggtctcatttcatatttcgttgtgcattatttatacgaaaagaaccgtaagttacgtttgaagaaaaggaagaaacgagtgagagaaccacttgtacaattataaacaatgtcacattcattttctcctttgaatatgtttaagaaaaaggaggagaggataatgtattattattacgtacctcaagtatatccatatgtaaattattatccggtttatgatacgagtagacaatacgaattatatcggcaacaacaattacagcaattatcacaaataccacaattaccaacacaacagcctacacaggaaaaaaaaccatatttaacaacatggccatattccaatgtatactatggtaattattacgaatcataaagctgcttctatttagaagcagctttatacgtttgttttcaaaattaaattttgaatggtttgaagagaatgaatgagcttttcgcgctcttcctcagataatgtttggaaattttcttttagtttgtctaaaatgaattgctgatactgatttactaataatttcccttcagctgttagagaaattaaaatgacccgtcgatctttttcgctataatgacgctctattagttcttcttgaataagtttgtttaatagaggtgtcatgttaggccgtgaaatcgctagccgcttgccgatttcggaaactgctaatgtgccgttttcatgcaaaagcagtaatacttgtgtatgtgatggcggcatatgtctttgagaagaaaattctccaggaagcataaatttgcgataaaaaagaggcactagcgaaagaagatgatcaacaatacgttcccactcgcgtgattccatataaaggcccccttccactatcattgtaacaaaaaagacatgttataaaaatagaattgtttcatggtcgctttaatatttgtaggataacacttgctttgtaaatgtattggcaataattgcatagccgttatcatttgggtgtacttggtcaaataataactcttttttatcatttgatattaatttgcgaattggtaaaacgatagatggttgatttgctttggaaatggaataaacagattcattccagccatctaaaaacatatctgcataacttgcgatggagtcatcgagttgtaacgggttatagagttctgagagaatgagtaaagcgtccggattttgatctcgaactgtctttacaatactttttatatccgcttcaaaatgggctttttctttatttaacatttttataccatctataacaccaacatcacgatttaaacgaaataaattatttcctccaatattaattgtaattatatttgctgctctaattttttcctttacatcttctgattgaacttttttagcgagacgatctgttgtaagaccgtttaccccaaggttttctactgtaattggtttatgaatttgtgcttctatttgcttagaagctaattcagcaaatccaccttgtgtcgatccatatcctttagcgagtgaatcacctaatacaagatgataaaaagattcgtttgtttgcttatcaatccaatttggggcagatgttttttctgttttttcttcagattcattttgttttgtctcgtcgttcttttcaaaataagaataagaaatgatcagaaggaggagacaaacaattgttaagatgacttttttcataaattcatcctccttgtaattggtaattgtatcatattcagcagtattagcaatgtaagggcatattatatgtttatgaaaagtttataataactttacagaaaatttgttgaagtttgtcaaaaaatattgacgataggaaagaactttatatatgataatgtcagataaggtgaaactttaatgagtgggagctttatttcctattaattgttagtcttcatcaatcgggcgtttaaggggactactcgttagcgcaggatgaaatgaaaattgtgtctctaatagaagaaaaaaggtatgtggttagagacagatagggattcatttcattatttctggtaattgtataagggggattttttgtgaaaaagtcaaaaaaaatgctggctggagcaactcttgcgattggtgttatagcaccgcaagtaatgccagcaacagctcatgcagatgagaacactggggagagtacagttaacttacgaattctagaaacatcagatattcacgttaacttaatgaattacgattattatcaaacgaaaacagataataaagtaggtctcgtacaaacggcaacactcgttaataaagcacgtgaagaagtgaagaactctgtcctatttgatgatggggatgcattacaagggacaccgcttggagattatgtagcaaataaaataaaagatcagaagaatcgtgtggatcctagttatacacatccattatatcgtgtaatgaatttaatgaagtatgacgtcatctctcttgggaatcatgaatttaactacggtttagattatttaaataaagtgattgaaaaaacggatttcccggttattaactcgaatgtctatatagatgaccatgatggtaatgatgagaatgacgagcattactttgataaaccatatcatattttagagaaagaagtagtggatgaagcaggccaaaaacaaatagtgaagattggtgtaatgggatttgttccaccacaaattatgaattgggataaagcgaatttagaaggaaaagtaaaggcaaaagatattgtgcaaacagcgaaaaaattagttccggaaatgaaggcgcaaggtgcggatattatagttgcactagcgcattcaggtgttgataagagtggatacaacgaaggaatggaaaattcatcgttttatttagcgacagaagttcctggcgtagatgcagtattaatgggacattcacatactgaagtgaaggatgtatttaatggtgttccagttgtaatgcctggtgtctttggaagtaacttaggtattattgatatgcaattgaaaaaggtaaacggaaaatgggaagtacaaaaagaccaatctaagccacaacttcgcccgattgctaatagtaaaggtaccccattagtagaatctgatcaaaaattagttaatgaaattaaagatgagcatcaagcgacaatcgactatgtaaatacacctgtaggtaaaacgaaagcaccaattaatagttatttttcattagtacaagatgatccttccgtacaaattgtgacaaatgcgcaaaaatggtatgtagaacaagaacttaaaaaaccagagtacgaagagattaaagatattccggttttatctgcaggcgcaccatttaaagcaggtggccgaaacggtgctacatattatacggatattccagctggaacgttagcaattaaaaacgttgcagatttatacgtgtatccaaatacgttatatgctgtaaaagtaaatggggcacaagtgaaagaatggcttgaaatgtctgcaggtcagtttaatcaaattgatccaaagaaaacagaagaacagccgttagtaaatataggctatcctacatataactttgatattttagatggcttaaaatacgaaattgatgtaacacaaccagcgaaatacgataaagatggaaaagttgtaaatgcaaatacgaatcgtattgtaaatatgacatatgaaggtaagccagtagctgatgatcaaaagttcatcgtcgctacaaataactatcgtggaagtagtcaaacgttcccaggtgtaagtaaaggggaggttgtataccaatcacaagatgaaacacgtcaaatcattgtgaagtatatgcaaaaaataaaaaatattgatccagcagctgatcaaaattggacgtttaaaccgattgttgcagataaattaaatacaacatttgattcttcaccaaatgcacaaaagtatataaagaaagatgggaacatatcatatgttggaccatctgaaaatgaatttgctaaatatgcaattgatataacgaagaaaaatgatgataaagaaactggtgaaggaaatccaacgacaccgccaacaggtgggggagaaaatccaacaacaccgccaacaggtaatggagaaaacccaacaccaccaacagaagaaggtaataatggtaatgaaccaaaacaagatggaaacaatactggatctggacaaactacaacagatgatcaaaatacaaaagaaacaacaacaactgtaagtgaaaataaagaagctgaaaaagatgaacgtgatttaccgaaaacaggtgcaagtattgcttctacaattggagcgggtcttgcgtttgttggagcgggattacttatgttatttagaagaaagaaagcgaatagatagtcgagaaatataaaaaggattaccgatttggtaatcctttttattatattatgaaactggtactgctttttcttttttccatgaaagaccgaatccagtaaagccgacgataatggttacgactggacatgctaaacagaagattgcgtatggcaggtaatcgaatgttggaacgctaagaacgtttgttaagaatacgccacttacaccccatggtacgagtggattaattactgtaccagcatcttctaatactcgtgataaattacgacgttctaaaccgacttcatcgtatttattagcaaatgcttgtcctgttaaaacgatggataagtactgctcaccgagtaagaagtttacaccaattgcagttgaagcagtagaaataattaagcgtgtactagtttttacgaagctagagataatattcatcagctgcgctataatacccattccttgtaataatcctcccatacaaagagctaggaaaataagagcaattgacatcatcatactttgcaggccaccgcgagataataagctatcaatatctttgataccagttttagaaacgtaaccgtcttgcataatttttattaaatcagctaaagaagtgctaggtttaaaaataaagagaataataatccctaccacaattcctgcaagtaatgttggaactgcgggtacctttttaaatgcgaataggaacagtaataaaataggaatcagtgtaacgatagaaatcgttgcatttttttctaatgtgttaataaatgctgagaaatcaacgtttccaccagatccgcttcctaaaatgaaaaatgcgataaaagcaataatgaaagctggcactgttgtccaaagcatgttacgaatatgttcaaataaatctacacccgttacagcaggcgctaagtttgttgtatcagataaaggagacattttatctccgaagaatgccccagaaataattgccccagcaataagagctggatcgtatccaagggcagtacccattcccataaaggcaagtcctacagttgcagcagttgtaaatgcactaccgatactcgttccaacaattgcacaaacaacaaaaacagttggaacgaaaatttttggagatacaagttggaagccgtataccattaaagttggaatagttccagctgcgatccaaatgctaattaatacgcctacaagtaagaaaataaatatagatggaataccagctgaaatactacttatcattcctttttccatagtagaccaatcaatttttttcataaatccaaacgctaataaaagaacgatgccaaataaaatcgggatgtgtggtgaaacttctaatttgataacactaaagccaatgcagaaaaagataaaaattgttaaaagaacagactcaatttttgaaaccattgttttcccctcctaagtaatgtgaaatagctcttttttatataaaattcgccaatattgtatatttccttctaaaatttagaattttgtgacaaattaccggtaattgttagttcttctatatgatgcggaaatgattggataaaaaaacgtccctgcatataattatgcagggacgaagaaatcgcggtaccaccctagcttgtgaaatgaatgtatcacaaaataaagggtcatatgatatgcgcttataaaataaaaaacgcccctgcaatatatgcagggacgaaaaattcgcggtaccaccctaaattgtgaaacagtgtcgtttcaccactctttagacataacggtctataaccgtccttcactactcctcacgtttcgtaaaagaagctccagggggtaattcataattcgctctgtactggttcgcaccgaccaccagctctctgaaatcagaaatcgaaatactactaaatcctatcaacgccgattcatatgatgttagttaaatttttatcatattttcatcttacatgtcaataaaaatattaaatgtttttttagggaaataaaggataattgtttttaacgctgtaaaaatgtacgttataatgaatttgaaagggggaggaaagagtgaagaaaaaaataattctttttaccactttattagttattggaggaagtgctggaatttacacagcttttgcggctgaatcagagcagttgaaacaaaagcaaatacaacagtcagaagtgaagaaagcgaaagaagctgaagagaagaaatcaatggaaaaagcagcagagaaactaggagtttctactgaggggaaaacaaaagaagaggttacgaaagaagtaaataccgctaggtttgataagcgtcatgatttattaattgagcacgctaaacaacttggaattgatacagaggggaaaaaagatgaagaaattattttagaaattggaaagatacagcatggaaagtagaacaacttatcatatgataagttgttcttttttaagaactatttgattttaaaataattgacagtcattcagatttaatgttaactatatttataaacaagttaacattaggggtgacaattgtgacaataaatagtaaaacgattgaaaaatcatcttatacatatgaagaattagcagagaaaaataaagcttacgtatggcacccatttacacaaatgaaagattatttagaagaagatcctgtcattattgaacgtggagagggaagaaagctatacgatgtaaatggtaatgaatattgggatggtgtttcatctatatggttaaatgttcacggacatcaagtaccggaattagatgaagcaattcgtgagcaattaaataaaattgctcattctactatgttaggacttgctaatgttccatctattttattagcagaaaaaattattgaggttgtaccagatggattgaagaaggtattctattctgattcaggttctaccgctgttgaaattgcaattaagatggctttccaatattggcagcataaagggaaaccaaagaaacaaagattcgttacattaaaagaagcatatcacggtgatacaattggagctgtttcggtaggagcaatagacttgtttcaccaagtgtatagttcgctcttatttgatgcgattaaaatgccgtatccatatacatatcgttctccttacggaaataataaggaggaaattgtaaaaagccatttagaagaaatggaagaattgttgaaagaaaagcatgaagaagtagctgccatcattgtagagccattaatgcaaggtgctggcgggatgattacaatgccaaaaggatatttaaaaggactgcgcgatttatgtactaagtacaatgtattatttattacagatgaggtagcgactggatttgggcgtactgggaaaatgtttgcatgtgaacatgaaaatgtgacgccagacattttaactgctgggaaaggtttaacaggtggatatttaccaattgcagttacggtaacgacggatgaaatatataatgccttcttaggagaatatgaagaacaaaaaacatttttccatggacatagctacacaggcaatccgttagggtgtgccgtagcaatcgcgaatctagaactatatgaaaaaacaaatttaatagaagaagtggcacgtaaaacggattatgtggcagcgcaattagaaaagctctttgcgtataaacatgtaggtgatattcgtcagtgcggattaatggttggtattgagcttgtgaagaataaggaaacgaaagaagcgttcgactggacagaaagagtcggtgttcaagtatgtaaacgctcaagagagctgggtatgattttgcgcccgctcggcaacacgattgtatttatgcctcctcttgcttctacaattgatgagattgacgatatgttacgtattttatataaagcaatctcggatgttacggagggagaataatgagcggtttttttataacagcaacagatactgaagttggaaaaactgtagttacaggtgcattagcaggtgtatttagagaacttgggtataacgtaggggtgtataaaccgttgcaaagtgggcatgttgcatcaaaccctgagggagatgcggcaaggttaaaagcattatcaggtgtaccgacacaagaaaatgaaatttgcccttattctattgaagaaccacttgctccgagacttgccatgaaaagagctggaagagtagtaaagttaaaagaaattactgattactataatgaactattaaaagagtttaatagcttatttgtagaaggggcaggtgggcttgctgtcccatatacagaagatgctttagtaattgattttgcaaaagaattacagttgcctcttattgtagtagctcgtcctacattaggaacagtaaatcatacagtgttaacgattgcttacgcaaaggcgcatggcttaaccgtagcgggtgtcattttgtcaggttgcaaagaatgtgaaatggaaagagtgcaagaaaataaagagatgattgaagagctgagcggggtaccagttttaggattattaccattctttgaaggtgagtttacgaaagaagaagtattagaatctgcaaaagaacatattatgatttcaaaattagaggagtttatccaaaatgaatcaaacgtggcgggcgcaccttcaatctaaattacaacaattacatgagcaagggcagtatcgtgatttgcatgtaacagagaaggcagaagagacttggcttattcgagataaaaaaaagatgttaaatttagcgtcaaataattatttagggttagctggagatgaaaggttaaaagaagctgctattgcctgtacaaaaagatatggaactggagcgactgcctctcgtctcgttgtaggaaatcatccattatatgaagaggttgagagaagcatatgtgactggaaaggtactgaaagagctttaattgtaaatagtgggtatacggcaaatataggtgccatatcttctttggcctctcggcacgatattgtttttagtgataagttaaatcatgcaagtattgttgatggaatcctattaagcggggcagagcataaaaggtatcgtcataatgatttggatcatttagagaagctgttgaaaatggcttcgcctgaaaaaaggaaattaatcgtaacagataccgtttttagtatggatggtgatactgtgtatttaagagatttagtacagctgaaagagaaatacggggcaatcattatagtcgatgaagcacatgcgagtggaatatatggaatcggcggagctgggttatctcatatagaaaaaaatcttgctcaaaaaattgatatacatatggggacgtttagcaaggctttagggtgttatggtgcgtatttgacaggtgatgaaatttatatagagtatttacaaaatatgatgagaagctttatttttactacagctttaccaccaagtacgttaggagcagtgcaaaaagcaattgaaattgtaaaagaagataacgaaagaagagagaaccttatagcaaacggagaatacttcagaactaaattaagggatgctggttttgatattgggaatagttcaactcatattgtaccgattgtagtcggttcaaatgaacatgctttacgatttagtaaaaggttgcaagaggcagggattgcggccattgcaattcgtccgccaactgtgccggttcatagttctcgaattcgctttgcagttacatcgcaacatacaatagctgatttaaaatgggctattgatcgaattattcacattgcgaaagaagaggagattttcgtatgaacgagctaaagattatttttatccccggatggggaatggaagagaatatttgggatttagtacttccgtattttaaaggatatcctgttgaatgcatagattggcataatgtgaaagaacgaagtgaatttgcggaacgaattatagatgtagcgcataacgacaacgtaattttagttggatggtcactaggagcgttagcagcagttgaagcttataaaaagattcaggcaaaaggcatcgtattaattggtgggaccgctaaatttacaaatacgagtgactatagtaatggatggaatgctttgcatgtagaacggctgaaaaggaatttggtgagaaggaaagaagatacgctcaagcggttttatgaaaatatgtttacgaaagatgagctaaaagagaacaaaaattttgaagacattgtagaccattttaaaggtgattctattcagtctttacaactaggtttggattatttaatagaaacagatatgagagaagaactaaaagaaattaaagtacctatactacttatccacggagaacaggatgtaatatgcccattgtctgcggcacgtagtatgacggagaatagcagcagcgagctgaaagtagtaagtgaagcagggcatgcattatgtgtaacgaattttgaatattgcgcaaatgagataattcaatttgtagaggggatacgacatgatcaacaaaacgttactacaaaaacggtttaatggggcagccgtatcttacgatcgatatgcaaatgtacaaaaaaagatggcacattcattactttcaatcttaaaggaacgatatagtgaaacggcatcaatacgtattttagaactgggatgcgggacggggtatgtaacagaacaattatcaaagttatttccgaaagcacatattacagcagttgattttgctgaaagtatgattgcgattgcgcaaactagacaaaatgtaaaaaatgtaacgtttcactgtgaagatattgagcaattacgattagaagaatcatatgatgtcattatttcaaatgctacatttcaatggttaaataatttacaacaagtgttaagaaatttatttcaacatttttctatagatgggatattactcttttcaacgtttggacatgaaacatttcaagaattgcatgcttcgttccaacgtgcgaaagaagaaagaaatataaaaaatgaaatatcgattggtcaacgtttttattcaaaagatcagttgcttcatatatgtaagatagaaacaggggatgtgcatgtttctgaaacatgttacatagagagttttacagaagttaaggagtttctgcattctattcgaaaagtaggagcaactaatagcaatgaaggatcatattgtcaaagtccctcactctttcgtgcgatgctacgcatatacgaaagagacttcacgggaaatgaagggataatggcaacgtatcatgctttatttatacatataacaaaagaggggaagagatgaaatgaaacaagtacaaacaaaaagggattggaaaaaacttgcatacgacgtagtggaagagaaaatgattacgaaagaagatgcaatagcgatattagaagctgatgatacagaagttttagaaattatgaatgcagcttacattattcgccatcatcactttggtaagaaagtaaaattgaatatgattattaatacgaaatctggattatgtcctgaagattgtggatattgctcacagtctattatttcagaagcaccgattgataaatatgcatggttaacgcaggagaagattgtagaaggggcacatgaagcaatacgccgtaaagcaggtacatattgtattgtagcgtctggtcgtcgtccgacggataaagaggtaaatcacgtaattggagcagttaaggaaattcgtgaaacgacagacttgaagatttgttgttgtttaggtttcttaaatgaagatcaagcaggacgtttagcggaagcaggcgtgcaccgttataaccacaacttaaatacacatgcaaataattacgatagcatttgttcaactcatacgtatgatgatcgtgttgatacagttcaaaaagcaaaacaagctggtatttcaccatgctctggagcgatttttggcatgggagaaacaattgaagagcgtgctgaaattgcatttgaattacaacgtatagatgcagattctatcccttgtaatttccttgttgctgtaaaggggacacctcttgaagggcaaaaagagttaacgccagtagaatgtttaaaagtacttgcaatgatgcgttttgtaaacccaacaaaagaaattcgtatttcaggaggacgtgaaatcaatttacgttctgtacagccaatcggtttatttgcagcaaattctatttttgtcggggactacttaacgacagctggacaagagccgactgcggactggggtatgattgcagatttaggatttgagattgaagaatgtgcattataagatagatgaaaaagcaaacttgtaaaagagtttgcttttttgtaaataaaatgtaataaatagttgtgaacgcttgatactattggtttttgaacgaaaaaaagaatttttgtggacgaattttccaagccctagttgtacatagtaaatatgtaatttatattgggttggaggattttacatgtacaaatacatattagcgattatgacttgtttaattttaataaaagcaataagttctgatccagttaaggctaccgaaaatcctgaacaaaaagagatgcaacaaagaatcgaacaacactttcgaacgaaagctgaacattttggattgaaaacggaaggaaaagatttaaaggaagttagaaaagaaattactattatagaagaagcgaaaaaaagagagaatgtatggagaacagcgcaagctcttcatataaaaacagaaggaaaaacgatgaatgaattaataaaagatgtacaaaaaaaggtgaaaaaataaaaagaggccgcagcctctttttttatgcccattgttttgataagtgagccatttcaattgcagcaacagctgattcatatcctttattaccagctttcgtacctgcgcgttcaatcgcttgttcaattgtttctgtcgttaatacgccgaaaataactgggatgtccatttgtagtgataaagacgcaacaccttttgctacctcattacaaacgtaatcgtagtgagttgtagcacctcggattacagtacctaatgtaataacagcatcatactttccgctactagccatctttttagcgattaaaggaatttcaaatgcaccaggaacccaagcaacatcaatatcactttcttctacaccgtgacgctttaatccgtctaaagctccgccaagtaacttacttgtaataaattcgttaaaacgtccaacaacaactccaacttttaatcctgtaccaactaaatgaccttcgaataccataataaatctctcctttaattataagtttagtaagtgtcctaatttatttactttcgtttgtaaatacgatttattctcttcttttgccggcatttgcaacggtacacgctcgactacttctaaatcgtaaccttgtaagccagcaatttttcttgggttattcgttaataatcgtaagctttgtaaacctaaatcttttaatatttgagcaccgataccgtaatcacgaagatcagcagggaagccgagtttttcatttgcttctacagtatcgaatccttcttcttgtaatttataagcgcgaagcttattaagaagcccaatgcctcttccttcttgtctcatataaagaagaacaccttttccttcacgctcaatttgagcaagtgctgcatggagttgtggtccgcaatcgcagcgatgtgaaccgaatacatctcctgttaagcattcagaatgaacacgtacaagtaccggttcacctgttgaaatatcaccttttacaagtgcgatatgttctttcgtatctaatgagttagaatagccaattgcgtggaaagtaccgaaatctgtaggtaatgtaatttccacttctctcgtcacaagtgtttcatgatggcggcgataagcaattaaatcttctattgtaatcaattttatatcaaattgttttgcacattctattaaatcaggtacacgtgccatcgtgccgtcctcatttataatttcgcaaataactccagctggttcggcaccgcatagctttgctaaatcaacagcagcttctgtatgacctgcacgacgcaggacaccgccttctttcgcaattaatggaaagatatgtccaggtcgattgaaatcagcgccttttgatgcggggtttaacaattcttgtatcgtagttgcacgttcgtgagcgctaatccctgttgttgtagaaacatggtcaatgctcactgtaaacgcagtatgatgtgaatctgtattatgagataccattggttctaattgtagacgttccgcgtaccctgctgtaatcggtacacaaacgagaccacggccatgtgtaatcataaaattaattgtttctggtgtaatgtactctgctaaagcaataaaatcgccttcattttctcggttttcatcatcacatacgataacgactttaccttgttttaaatcttctagagcttcttcaatacgatgaaacattgtgcttcccccttatagaaatccgttttcttgtaaaaagctttcagtcattgaacctactcgttttgtaggtttagtaataaagcgttcgatatatttaccaatcatgtcacactcaatgtttacgatatctccggcatttttttctccaatgacagattcgcttactgtgtgcgggatgagtgaaatcgttatggaagattcgtctatagcaaatatcgttaaactcgttccatcaacagcaatggaccctttctgcaaacaatagcgcagcagttcatcagaaattgctattttgtaatagacggcattgtaatgttgttttttatttaaaatcgttccgatgccatcaatatgtcctgaaacgaaatgtccaccgaatcgtccgtttgcagccattgctcgttctaaatttactttagagtgtggtttaagtatacgaagtgatgtcgactgcatcgtttcgggcattgcatcaactgtaaatgaagtagttgtaaagtttgttacagttaagcaaataccgttaaccgcgatactatcacctaagtgaacatctgataaaattttctttgcatgaatcgttaatttcatcgcttctccactttgttgcatgtttgctatcgttcctaattcttctacaattcctgtaaacatttcgtcacctcgtttcgggcattcgcaacgatttttatatcatcaccaatttgtttcatctcttgaattttcaaggaaagcgcatcttgtaattttgaaaaaccatttcctccaaataaagtaggagcatctttcccaccaattaatttcgggcttatataggttacaatttcattaaaattgtttgtttttaagaaacttgcatgaatcgattggccaccttcaacgaatagagaaagaatttgtttctctccaagaaaggaaagaaggtcctcgatttctatatgcttcgtttccatttggaatatagctatatttttagattcataagaagatatcttctctttctttacatccttaccgacaataatccatgtcggtgctaaaccatctgttataacatgagaagatggtggcgttcgtaaatgggtatctaaaacaacgcgaataggatgtttcccaccatttggaattcttgttgttaaatgaggattatcagctataactgtattcactccaacaagaattgcatcatgtgtatggcgatattggtgaacatcagcacgtgcttcttcacctgtaatccacttactttcaccagttacagttgctgtttttccatctaagctcagcgctgttttgattgttacaaaagggcgtttcgttttcatgtagtgaaaaaagtagcgatttaataaaactgcttctgcttcaagaacaccagtagttacttcaattctagcttcctctaatcttctttttccgttaccagaaacgagcggattacaatcgagagtagcaattacaacacgcttaactcctttttcgatgagcaattcacagcaaggtggtgtttttccaaagtggctacacggttccagtgttacataaacggtagcgtctttggcgttctgaccagccatttgaagggcatgaacttctgcgtgttcttcaccagctcgtaaatgagcgcccataccaacgatgtttccatcttttacaacaacagcaccaaccataggatttggacttgtttgtcctgatgttccttctgctaactgcagggcaatcctcatatattcttgatctgtcattttcttcacctctccaaaaaaaatcaaaaaaccccaaggatttaatatccttggggtttgggagacgtgatttctagaaatatagtttgaatacgaaagcataggaaagaaacctaacgataattgatatttctgcataaggaaaaaacctagcaaaatatcgaatttttaaacgctagttgtctctttttatttcagtataaaaaataagtatagaaaattaaacatatataaagaatcaaaatgaatctttaaaaatatgcatactgaaataaaagtgtattcactatataaaaaactagaaacatatccttctcccatccagactatactgtcggccctagagtttcactagatccaccgttttcgagttgaaaacgggtcacggacttagaagttttcacttcatcaccgccggttgggaatttcacccgaccccgaaggatgctgtttgctcaaattatagcacaaaaaaaataaaaggctagtaaaaaatattcgaatgtgaagaattgtgtgaaaatatatgcaggctggaatggaaataaaagtattagaaatgttgtaaagagaagggatataacggagttgctaaaaagaaaaaacatgcacaaaaaaatgtgcatgtcacatgtaaaattattctgcctctggtgctctaacaacagactcgaatttacctttatgcgaagcgtcgcaataaggcatattttttgataaaccacaacggcataaagaaaatgccggttttgctgggaatgcattcccttgtgagtcgactaattccacgtcccctgtaacgcgaaaagagccattatcatttactttaatttgtacttttgccaacgttatccctccttcccaaacgcttaatttcatcatataatcaagggaagtgcttggcaatataaagtgaaactttaattagtgggggaggcatcccccactaattattagttgaaccaatcgggcttttaggggcagttaatctcctacctaacttctttgtttcagccgaattttgaggtgggagttttactgcccgcaaatagcggagaaaaaagagcactttgtttgagaaagaagagagtgttataatagttttcataactgactagagtaaggtgacgagagatggataaacaattacatacattacgaaacattgcaaatgagcgcacgtgggcatcatttttgaatgataatcatccatatagtttgttacattggtccattgcaggtgtagggcaagaggcaaaggatgtttggttactgcaagatgaagtaacatttcaaacgacagaattcccaacgttagatgatgcaatgcaatggatttctgaaaatatggaacaagttacagacgttttagcgcaataaaaaacaggcttatgcaagcctgttttttgtttctttcacatatgtgtttaaaaattgatcgacggctgcttcgtactcttctttattttcgttataagagcaagcgtgtgcaccgtgttctgcaatataaagctgcttattattttctttcgcttcatataacgcttttgtcatatcagctaaaatatagtcgtcatctttactatgaataaagagaacgggattgttaatgttttttatacagtcgattggtgaaacttcacgaattgtataaccgtcacgaactttcaaaaatgcgtttgctaaaggtaataaaggccattttggtaaatggaattcaacctttaaacggtgctgtaattgtccgtgaaaatcagagaaaggacaatctgcaatatagaaatcagcaccatcttctacaagtcctgcgtattgaagaagtgttgcagctcccatagattcaccatgaataccaagtgtaatattggtgccaaaacggttttttagccagtcaactacggattttaaatcatgtttttcatagtatccatagcttgttgtttttccgccagttttaccatgacgacgatgatcgtaaatgaggacgttatatcctctttttaagaataagtttgcatattttacagagtttattttatttacagttacaccgtggcaaaaaaccataaacttattggtggaatgaccagcaggaatgtaatatccgtgaaggtcgtatccaaattgtgaagggatatgaatttcttctttatgaagagcatcaaaatcctctatacgaaaatgttttttcgtttctctttcgagtacttcttcctctgtttttttctttaagtacatcactttatttgtaaagaaaatcccaagggcagttattgcacctagtatagtaaacagtgctgcaaaaaaacgtttcatactttacctcatcctccaaataccgttacatgtgatacacttatattgtatcacaatgatataaaaggggagaaataggaaatgctgcatatacaaaaaattacgccagcgatgaaagaaacaatccgaatgttcatgtgtgagaactggggaagttcattgatggtttcacgtggtaagggacatcagttagaagagttgccaggatttgttgcgctctcagatgacagaataatcggaattataacgtatgaagtgaccagaaatatgtgcgaaattgtatcgctagatagctttgaagaaagaaaaggaatagggacgaaacttgtggattgtgtattacaagttgcagaaggagaacggtgcagacaggtttggcttattacaactaatgataatatgaatgcgttacgattttaccaaaaacgtaattttgtaatgactaatttatatgtgaatgcggtagaggaggcacgaaaaataaagaaagaaattccacgtattggatatgataatatcccgattttacatgaaattcagttggagtatcgtttagtgaaatgatgtaacaattttcagaaatatgagttgttaatcttgacggatagtttaatttaggttaccgtaaaattgtaatctattaccatattaaggggtgacgatgtggcaactatacgtgatgttgcaaaattggcaggtgtttcagtcgcaaccgtttcacgagttattaatgaaaaaggatacgttcatgaggacacagtaaaacaagtaaaggaagcaattgaagaattacgttataggccaaacagtgcagcgaagccactatttaaagaggattcaacgataattgcattacttgtagataatttatgtaaccaatcaaacatcactttgctacattgtattgaggaaatagcatataaagaaggttatcaaatcattatttgtaatatagagaataaagatagatacatacatatgctgaagcaaaataacattgcaggtgttattttgacaagagcagtttttaaaagtgtaggaaaaattccatttccgtttgttgtgatcgatgagcaacaatcacatggaaattattatgaaagtggacagagagctgtttctttattaaaagagaaagggtgtcactttcttgcatatttcggtgagggagaagaaagtgaagaaatggaagatcatatagcagggtttttagacgctgtttgggatgaaggaatctcttatcgagaagaatgtgtacaagggtatacaaataaacaatttattacattattgcaaaacaatccgtatgtagatggaattgtagcctcaagtgatcagattgctattgatttaattcggtcagcgagatttctaaatatacatataccagataaattaaaaattgttggaccgaatgggagcatagagtgtgaatggagaggttcatcactaccgacaatagaaagctatgtcagagataatggaaaagtagcttttcaacaattaaaaggaaaaataaaaaagtaaaaggtgcgttttatacgcacctttttataatgtaattgcggcaataaagccaaatataagtaacggtatattgtaatgtagaaaagtgggtacacatgtatcccatatatgatggtgctgaccatcagcatttaaaccggatgttggtccaagtgtactatccgatgctggagatcctgcgtcacctagcgctccggctgtaccgataattgcaattgtggccattggactaaatccaagctgaatgcaaagaggtacaaaaatggttgttaagatagggatggttgaaaaggatgaaccaattcccatcgtaacgagaagtccaataacgagcataagaaatgcagcgagtggtttgttatttccgattatatgtgcactcgtttgcactagagattcaacatgtcctgtttttcgaagaacagcgccgaatccggcggcagcaatcataacaaagccaataaaggacatcatacgcattccgcttgttaatatcgcatctgcttctttaagtggtagactgccactaactgataagacgataatacctgctaaagcaccaaaaatcattgattctgttgttaattgaacagttaatgtagcaatgatagataataacccgaaagtaatgctacgttttgtatagggaacgatttcattttcggtagtatgaatttgttctgtttcatacgtacgaggttttcggtacgtaatgaataccgctacacataatccaataatcataccgattgctggaatagtcattgcttttggaataagtgcgacatcaaatgtaagaccgctttgcgcagcgttggtttgcaatacgtcatgataaatttttccgaaccctgcagggatccacatataaggagtaatcaatccaaatgtaataatacatgtgacaagtctgcgatccactttcagctcagttaatacttttaaaagtgctggaattaagatggggatgaaagcaatgtgaacaggaatcacattttgtgagaaacaagccatcattaaaataatgaataaaataagtaccttagaataaacttgttttttcgtgtcttgttcattgccaatccattttaatgcagtttgaatcatagcatctggaagtcctgttttggaaagggaaatagcgaaaccaccaagcattgcataacttaaagcgattggagcactgtttccaagaccagttgtaaaagtgttaatcgtttctgaaataccgagtccgccgataagtccgcctgttaaagctccaacaatgatggcgacaatgacctggacacgtaacaaactaagcaatagcataattgctactgcgacgagtacagcgttcataataaatgtaatctccctaaatttttattctgttaagacaagtacatatgaaacattttgctatgtttatacatacttgcgacatattattataaaatgttttctatgaaatgtaaaagagccttttgtgactaatgctgaaaagctagctcttgtttaattgattgcaaagaattggcgaataattctggttcttctagatcaggagaatgtgctgagtttgggaaccaaatcatcttttttataggcgcttcaataatatcgcaatattcctgaacgagtgcataaggggtttgataatcatagcgaccagaacaaaaataaactggaatagataaacttgagatagaagaaaagaaatcgattgtcagcatttcttcccataaaacgccagattttaaatttcctgcgagaaacttgaaccaatctaatagcgtgtactcaggagaaaagaaaccttttcgtatgaaagaaaaggaagatccattttggattgcgcctccgaatgtgccaagccactttctttgaataatgagacgtctcgtatctaaaaatggtggctttcctaattttaaaagggaagctaatgcttttttatgattatgtttttttgcagaacgaattaaatgttgatatagcaattcttcattttgtttcatatgtacaatttgcccaataccgatgtaagcctcaatatactttggatattgatgtgctatgttaagcccaatgatacttccccaagaatgaccagcgagaaatagtttttgtttgttgaaccttttaagtacatattgaatcacttcttttgcatcggaaacgaattgttcgattgtgaaatttgctccgaaatcttttattgaaaaggatttaccagccccgcgctgatcccaattaataacaataaattgcttctctaattctttttgaaaatggcgaataaatccgatttgtgccatcccaggtccgccgtgacagcataataaaataggttgctctacgttttgtccacgcataaggagagtttgttttcgattattaatcataacgctttctatcgtagcgatactgttaggaatgagttgtttgttttcattatagaactgaggggtgtagctacgaaaaagcatattgaaaacctccttttgtgaaatcgtatgaatcgcacaggctattcattttgcatatactgttagaaaatcattgtaacataccatactagtgtcatttcaacacgggaggagggaaattgtgacgattggagaaattatagatggtttaaatagacgtgaacccatcgctattatagcaaaacgtcttgaaataagcccgtatacattatcgaagaaattaagattgattggatacgaatatgatggagagcagaagaaacgtatttttgtaggagatggagaagaaccacgtcacttacaactccaagaagcgaccgcccttcaatatgagaaaacagattatcaattgttaatttatgagcaattacaaagcatttatgaattattaagaaaaagagaagaagtaattgtaccaattatgagtaaaagtgcagagaagaagagacgaaccttttctattaatacagaaatattatcacaattggaccttatatcagaatcgaaaggaattcaaaaatctaaacttgtagaagaggcgttgcaccaatttttacagcaatatgaagttgacaaaacatcacattttgataactaaagaaaaggatactatgttcattggaagaacgagtatcctttttatgatgtatattacgtataaaatagaggatcagtataaatcctttatggcgtgaaaaatgaaatttattattagagaaacacttaatttactttttgaattcttccatcaataactggctgaattggttcttttaattgttttacgtaatcgactaacgcttcaaagtcgtttggaccagtttctgcatttttaccatttttaaatgatacgaatccgtcaccgccagaagctaagaaggcatttgcaactacgctatacattttagatggagataattcttctccgtttgttaaacgtatatttgtaactttttcaccgtttggtttatttgcatcccacgtatattgaatacctgaaatttgaagcattcttgttgttcctttttgccattgctgatttaaaatatcgcgaatgtcttgacctgttaaatctactttaattaattgatttccaaaaggttgaatgccgtataactcaccccacgtaatatcaccagcatctaagtcattacgaatgccaccaggattcatgagggcgatttgagtttgcatcgtttgacgctgagcatcggcaactaaatttccaagagtggactcaccagcatcattttgtttacggtcgataggtgctgtagattttccgactacttcatttacaagtggtgcaattttttctttatattgatctagttttttctttacttgtttatcaggttctacaccttcatgatagggtgtaacaacttcagcttttttctttacaatatcctttgttttacgatcaattgttacatccacgtctgagaaagccgttccgtatgaatttgcttggacaattagtttattatttactgtaccatttacatacgtatgactatgtccaccgaaaataacatcaacttctgggtctgtttcatttgcaattcgagtaagatcgccatttgttaccccagactcatcggttgttccaccgacatgagcaagaacgacgatagatttaacgccgagacgttttaattgttgtgttgatttattaattgcttctacttcatcagtaatttgtacattgttaagcatcgtaggcataacgacatttggtgtatcagttgtaacaaccccaatgaatcctacaggaacaccatctaccatttttacagtaaacggtggtaaaaataagcggccagttgatttgttgtagaagttagcagctacataggggaagttagcccctttgaaattccctgttttttcatgatatccaccgtaaatgaggcgttgcatttcatcaataccttcatcaaattcatggtttccgattgtaccgacatcaaattttaagtcatttaaaaattcaattgtcggttcatcttgtaataatgctgaaactggtggactagctccgacgatatcaccagcatgtacgagaagtgtattagggttttgttttttacgttcttttaaataagtagctaagtaatcagcgccaccagcttctttattattgatttttttaacagtatctagttgtccatggaaatcattaataccaagcatttgtacgtctatgtagcggttttgttcagctggattctgagatgggggagcggcaaatacgcttgaaaaagtaatggtgcttaaaacagcaacggcaggaataatttttttccacataatataattctcctttttttataatctgacatcatacgacataattttaatagattcataggattatagctacataaaaatttagtcttttcgaaaaattaacatatttacaaaaagtgaataatagagtgaagacctttttttattgtcgatttcatcgtgtatctactataatggagaaaaaagtaaaaggtgagtagcatgaagaaaaagaaacaaagacaaatacaaagacaatcacaagtgaatcaaccgaagaaagaaacacttacattaggcgatcaattaaatgattcactcatgcaacaattaaagagtaagaagaaagagttgcaagtgagggaagaggaaaaagaggcagctgaactggaaagaaagcgccaagaacaaaaagaacgtgaaaagaataaatcatttgaagaactgctaagtgaaagtaaccttacttggaaagactttaaataataaaaaatgatcagtggtatttcactgatcattttttgacgagcttgtaagaaaaggggagttagaatgagaaaaattatcgttgttccacatgaaaaccattggagtgaaaaatttcaaatggaggctgaaagattaaaaacagcgatgccagaaacggtgaaaattcatcatattggaagtacgtcagtgcccggactggcagctaaacctattattgatatgatcatggaagtagaaaatatcgaaagagtagatgggtggaatgaacgatttatagagcttggttacatcgtaaaaggggaaaatggtatttcaagacgccgatattttattcatggaactgaagaaaaacgttcgtatcatttacacgtgtttgaaaaaggaaatccagagattgtaaggcatttagcgtttcgtgattatatgatggctcattgtgaagaagcagaggcatatgcaaccttaaagagagaattagccgaaaagtatacatatgatggcacgttatatacggaagggaaaaatgagtttgtgcgcaatgtggatgaaaaagcgaaagaatggagagaaaataacttaaatgaatgagttcacgttattttttagctatataaaagtgttatgtaaactgtacgtatgttttgacttttgggatgaatcttgttgaaataaagttgtggcttataaaaaatgtaacaatgaaagggagacgactgtgcatattccaacaactacacttcataatggcgtgaaaatgccgatgattggtctaggcgtatataaagcgaaagaaggagacgaagtaaagcaagcagtaaaaacagcgttagaagttggataccgttcgattgatacagcaactgtatatgaaaatgaaagcggtgtcggagaggcgatacgtgaatcaggaattccaagagaagatatatttataacaacaaaagtatggaacgacgatcaaggatatgaggagacactcgaggcgtttgaaaagagtttgaaaaaattacaaatggactatgtagatttatatttaatacattggccggtaagagggaagtatgttgatacgtaccgagctttggagaaattgtatgaagaaggtaaagtgcgcgcgattggtgtttctaattttcataaacatcatttagaactattattaccaaattgcaaagtgaagccgatggtaaaccaagtggaacttcatccgatgttgacgcaatttgagttgcgcaattattgtcaagatgagcaaattcaaatggaagcatggagtccgttaatgaggggcggagaagtattccagcatccaatcattcaggctattgctaacaaatatgaaaaaacacctgcacaagttatattaaggtgggatattcaaatcggaattgttacaattcctaaatctgttacaccatctcgtattgaagaaaactttactatttttgattttgcactaactgaagaagagatacgtcaaattaacacgttgaatcgtgatttacatgtaggaacgaatcctgataaatatgatacgttataaaaaagactgtctcctaatactggagacagtcttctgtttatcggtaattcgatatttttaacgatgcaaagcatatgtgtcatatttaacaatcttttgaagttgtatatattcttctttcgttaaaggtaactgttggctagctcgtatattttcctgtaattgttgaagcgagcttgcaccaggtataacagctgcaacagtcttattatgtaagcaatattgaatagctgttcctgttaaagagcgttctccaatcgtttcttttacactcgctagagttgtatgtaattcatcgtaagaataagagagataatccttttcctttactctttctatttttattgcattgttgtcagttaaaattccttttgcaagtggcccgcgggcaatgacgctaatttggtgttcattcagaaggggaaaccattcttctggacgacgatttaaaaggctatattccattagtacactaacgatgtttgagcgttttgcatactcacgaacgacatttgggcgtatagaagaaataccataatggcgaataataccttcctttttcaattcttcaaaagcttcaattgtttcatctattggatcttcaatcgttcccccatgaagttggtaaagatcaatataatcagtttgaagtctacgtaaactttcctttacttcagtttttatgtaagctttagaaggatcccaagaccagccatttttttcttctgtccaacgatttccaactttcgttgtaagaacaatttggtctcttcttcccttcaaggcttttccaacaaattcttcatttaatccgtaatcatataaatctgctgtatcaaaaaaattaattcctaaatcgattgcttcatcgataatatgcatagcttctgtttcagatgtaccgagagacatacagccaaggcccatttctgtaacaaacaaatctgagtttcctaattgacgttttttcataggtcaacctccttacctttattgtacgagagggaaaagaggttgacaaacgtttacttttcgtttcgcattaactgcccgtaaaagcatgattaatgtttcactttatttgctgtaatccactcttgtacagttgcatactctttgctatattgctttagcttatggcgaatttgccatgcttttccgactaaagtgacgcgatttggtaaaatataaactttcatttctatcacgctcctttcaatgtggtaaaatgtatgaggaaagaataggaaatagaacagggagatgaagtagtatgagtaatcttgcagagagaacagtaaaaactgagccgatttttgatggtagagttataaaagttcgtgttgatgatgtagtattaccaaatggagcaatgagtaaacgtgaaattgtaaatcaccctggtgcagttgctattattgctattactgatgaggggaaaattgtgcttgttgagcagtatcgtaaagcgcttgaaaaggcgattatagaaattccggctggtaagttagaacctggtgaaaaacctgaggtaacagcagttcgtgaattagaagaggaaacaggatatgtatgtgaaaatatggagctcattacttctttctatacatctccaggattcgcagatgaaattttatatgtatataaagcgacaggtttgacaaaaaaagaaaataaagctgagttagatgaagatgagtttgtggaattaatggaagtatcgttagaagaagcgattactcttatgaaagatcttcgtattcatgatgcgaagacgatgtttgcagtacaatatttacaactacaaaaataaacactcgccaaaggcgagtgttttttaattgatttttgcatatacacgtgcatcacgtaagctaccatctggtgctaggaaatcattttccattgtaccttctagaatgaattctagacgttctgctaagctacatgcatttatatttgttgcatcagtacgaatttcaattcttctagcgcctagtttatcaaaggcgaactgaattgcacctttaacagcttcggtcatatagccttgttttgtataggcactatgtagccagaagtgaagtgaaaactttggaatatcccagttttcaggctgtagtgtaattgctccgatgaatgtaccagatactttatcgtataagtgaaaatcaagtgtttcacgaagtaaaaactgtccgtgagcttcgcgaacaatttcttcagcactctcttctgtttcagcgttaattggtatccacggtactaagtcttctagagaagcttggattgcttcatatacttctgcaccatcacctggaaatggtttacgaacttgcaagcgttcagtttgaaataatgttggaaaatctaataataatggtttcaagagaaatccctcctattctctactttttagtttagcaaagtagagcggaatttcaatgttaattcgtcatacttttttctttctttcatacatttttaataagagtgtgaacggagggaaggaaaatgtggcgaaaaaattggcaagaccgtgtaatgtctcacatacaggaaaactcttcattatatatatttaacgccgttttattattgatgggagtaatattcggagctattctggtgaatagtttacaaatcaatcaaaaacaagatttatcattttatttacaacgtttttttggacaagtctctaaaggagaatttgccattgcgggcgaaatgtttcgagaaagttacttttcgcaattaaaatacatcggatttatttggattttagggatttcaattattggattaccacttatttttattttattatttgtaaaaggagttgtcgttggatttacagttggttttttagtaagtcagcatggatggaatggattattattagcatttgtatccgttttgccacaaaatttaattatcattccagtctttctcgttatgacaactattgctgcaagtttttctttacggatgattaggcatcaatttattagaaaaataaccgagccactattaccattattaatccgttatacatgcttctttctcgtaattggagtggtgttagcacttgcttctagtgtggaggcttacgcatcaccagttttaatgaaagaagtcgttgaggctattaataaaaaataaatactttttgagaataattatcaatttgtttttattgtttttttcttttgacagaagcccttcttctgatataatggtgtaagagtggcgaggagggagtagtaccgaatggaagaaagaattgaacgaattaagaagcaattacatgcagcgagctacaaattaacaccgcaacgtgaagcaacagttcgtgtgctgctagaaaatgaagaagatcatttaagcgcagaagatgtttacctccttgtaaaagaaaagtcgccagagatcggattagcaaccgtctatcgaactttagaactattatctgagttaaaagttgtcgataagattaacttcggagacggtgtttcacgctatgacttacgccaagaaggtgcgcagcgtttccaccatcatttgatttgtacacaatgtggtgctgtacaagaaatacaagaagatttacttggtgaagtggaaaggaaagtagaacgagactggagctttaaggtgaaagatcatcgtttaacattccatgggatttgtaaaaattgtcaagaaaatgaaacggatgaaaaataaccttttcctatttatctaggaagaggttttttatttgaataaggtataaattggtgaaagcttggcatatgttgtaataacttatattttggaggaatttacaatgcgccgagctttaaaattaacttttgatggaataaaagtatttttattatttacaagttgtacgattttgttttatttcgctatactatggataaatgaagaatatgaaagctatcatcgttatgaaaaacctaaagaagagactgtagaaaaagtatcagggaatgaagaaccggcaaaggatgctttcgtaaatagaatgatgtttttctatgaaaatggggagtagtgtagagtggaagatcaattaaaagattttattcattatatggttgtcgaaaaaggattagcaaagaatacagtagtatcttatgaacgggatttaaaaagctacgtaaagtatttgcaaaatgtggaacagacgaaaacttttcatgaagtgacccgtttacacattgttaattttttgcagtatttaaaagagaacggaaaatcttcgaaaacattggcgcgtcatatcgcatcaattcgttcgttccaccaatttttacttcgtgaacgagcggtagaacacgacccatccgtacatattgaaacgccacaaggggaacggaaattaccaaaagtattatcagttgatgaagtagaggcgttacttcaaacaccaaaaatgacaagtgcttttgggattcgtgataaggcgatgctagagttactgtatgcgacaggacttcgtgtttcagaattgattgcactcaatttagaagatgtacatttaacgatgggatttgttcgttgcatagggaaagggaataaagaaagaattattccactaggaagtttagcaacggaagcgattcaaaagtatattgaaaaaggaagaagagaattaatggggaaaaaagtagtagatgcactctttttaaaccatcatggtaatcgtttatcaagacaaggattttggaaaatattaaaacgattagcgaaagaagcaaatattgaaaaagagcttacacctcatacgttgcgtcactcgtttgctacgcacttattagaaaatggagcagatttacgtgctgtacaagaaatgcttggacatgcagatatttcaacgactcaaatctatacgcacgtttcaaaaactagattaaaagatgtatataaacagtttcatccgagagcatagttactatgctctttttttcatagattaagaggggaagaccgcttcacagaaacttcacaaacatttcgtatattgttttcagcagaagactggaatattacaatgtatttcctctatactaaatagagtataaaggaggaaatgatgatgaaaaaactgattataactttatttatcgcgatgctagcgttggctggctgtaatacaaacaaagaagaaccgaaaaaagaaaagaaacttgaaagtgtaaacgtagcaattcaaacgaatccgaaagaaattaaacctggtgaaaaaacagaagtacaagcacttgttacacaaggaaaagaaagagtaaccgatgccgatgatgtaaagtttgaaatttggaaagatggcgacgagaagcacgagatgttagatggtaagcataaaggaaaaggtgtttatgcagtagagaaaacatttgaaactgacggagtatatcatattattcctcatacaaatgcacgtgatatgcacgttatgccagaacataaagttgctgtaggaaatgcgaaagtagaagatgcaaaaaaagaaaatagtgaccacagtgcaggacatggagatcataaaagtgacacaatgatccatcttatggctggagacataaaggcaaatgctgaatctacaatgaaagttcatttaaagcaaaaagaagaagcattaactggtgctgaagtacaactagagatttggaaagatggtgttgaaaaacacgaatttattccagcgaaagaagggaataaaggagagtatgaaacgaaacatactttcaaagagaacggtgcttacaaagtgaaagtacatgtaagaaaaggcgaattgcatgaacataaagaagaaacaatagaagtaaaataaaaagtagctctttagagctactttttatttttaatatgaagaaataaatcataaaaaaattagcacttcgttgcagaatggattacaatagaagtgtgaagaaaatgagaaattctacgaaaatgtattaaaaagaaagcgtaaacatgttatgatatcagtatcagatgtctgacatctgacttagaaaaaactagaaatgtttttgaatcgtttcaagtaaacgaaataggttagaaaatgatttaaagaagtactgtttgacaatgagaattctttttgataacagtttcactttatagcgttttgaacatactacaagaagtagaactgaacttataggagggcgcagttatgaataaatataaacgtatattcctagtcgtaatggactctgtgggaatcggtgaagcaccagatgctgagcaatttggtgatttaggatctgacacaattggtcacattgctgaacatatgaatgggttacaaatgcctaacatggtgaaattaggtcttggtaacattcgagaaatgaaaggtatctctaaagtagagaaaccacttggatattacacaaaaatgcaagagaaatctactggtaaagatacaatgacaggtcactgggaaatcatgggcctttacattgatacaccattccaagtgttcccggaaggattcccgaaagaattacttgatgaattagaagaaaaaacaggccgtaaaattatcggtaataagccagcttctggaactgagattcttgatgaacttggtcaagagcaaatggaaacaggctctttaatcgtttatacttctgctgatagcgtattgcaaattgcagcacacgaagaagtagtgccacttgatgagttatataaaatctgtaaaattgcacgtgaattaacattagatgagaaatacatggtaggtcgtgttattgctcgtccattcgttggtgaacctggaaactttacacgtacaccaaaccgtcatgactatgcattaaaaccattcggccgtacagtaatgaatgaattaaaagatagtgactacgatgtaattgctatcggtaaaatctctgatatttatgatggtgaaggggtaactgaatcacttcgtacgaagtctaacatggatggaatggataagcttgtagatacattaaatatggactttacaggtcttagcttcttaaacttagttgactttgatgcattattcggccatcgccgtgatccacaaggatacggagaagctctgcaagaatatgatgcacgtcttccagaagtattcgcaaaactaaaagaagatgatctattattaattacagcagaccacggtaatgatccaattcaccctggtactgaccatacacgtgaatatgtaccattattggcatatagcccaagcatgaaagaaggcggacaagaattaccacttcgtcaaacatttgctgatattggtgcaacagtagcagaaaacttcggtgtgaaaatgccagaatacggaacaagcttcttaaacgagctaaagaaatagggggataaacaaatgaatcgtgaacttattacaaaatcagcttcatacttaaaagagaaatttcaagagacaccacaagtaggactaatccttggatcaggactaggtgtattagcagacgaaattgagaacgcagtaacagtaccttacagtgaaatccctgaattcccagtatcaactgtagaaggccatgcaggtcaactagtatttggtacacttcaaggtgtaacagtagtagcaatgcaaggacgtttccacttctatgaaggatacgacatgcaaaaagtaacattcccagttcgtgttatgaaagaactaggtgtagaaacagttgttgtaacaaacgcagctggtggtgtaaatacatcatttgagccaggcgatcttatgttaatttcagaccacattaacttcatgggtacgaatccattaatcggaccaaatgattctgaaatgggcgtacgtttccctgatatgtctacgtcatatacggtagaacttcgcgaaatggcgaaacaagttgcagcagacttaaatattaaagtacaagaaggtgtatacgtaggaatgacaggtcctgtatatgaaacacctgctgaaattcgtatgcttcgtacacttggcggagatgcagttggtatgtcaacagtacctgaagtaattgtagcgcgtcatgctggtatgaaagtgttaggtatttcttgtatttcaaatatggcagctggtattttagatcaaccacttcaccacgatgaagtaattgaaacgacagaacgtgttaaagctaacttcttagcattagtaaaagcaatcgtaaaacaaatgaaggggtgacttcacaatgagaatggtggacctaattgcaaaaaaacgtgacggacatgcattaacgacagaagaaattaactttattgttgaaggatatacgaatggtgatattcctgattatcaagtaagttcacttgcaatggcaattttcttccaagatatgaacgatcaagagcgtgccgatttaacgatggcaatggtaaatagcggtgatacaatcgacttatcagctattgaaggtgtaaaagtagataagcattcaacaggtggtgttggtgatacaacgacacttgtattaggtccattagtagccgctttagatgtaccagtagcgaaaatgtctggacgcggtttaggacatactggtggtacaattgataaattagaagcagttccaggattccatgtggaaattgaaaacgatgaattcatgcgtcttgtaaatgaaaacaaaatcgctgttatcggtcaaagtggtaacttaacacctgctgataaaaagctatatgcacttcgtgatgtgacagcaacagtaaactcaattccgcttattgcaagttcgattatgagtaaaaaaattgctgctggtgcagatgcaattgttcttgatgtaaaaactggagcaggtgcatttatgaaaacggatgaagatgcaaaacgtttagcagaagcaatggtacgtatcggtaataacgttggtcgtaacacgatggcagttatttctgatatgagtcaaccactcggtgaagctatcggtaacgcattagaagttcaagaagcaattgatacattacaaggtaaagggccgaaagatttagaagagctatgtttaacacttggaagtcaaatggtgtaccttgctggacaagcttcatctttagaagatgcacgtgaaaagctaattgaagtaatgaacaacggaaaagcgctagaatcatttaaaacgttcttatcagcgcaaggcggcgacgcatctgttgttgatgacccttctaaattgccacaagcacaatttaaaattgaagtggaagcgaaagaagacggatatgtatcagaaatcgttgcagacgaaatcggaacagcagcaatgcttttaggagcaggacgtgcaacgaaagagtctgaaattgatttagcagttggtctaatgctgcgcaaaaaagtaggcgatagagtgcagcaaggtgaatctctcgttacaatttacgcaaaccgcgaaaatgttgaagatgtaaaagcgaaaatttatgagaacatgaagatctctaaagaacacgtagatgcaccaactttagtacacggtatcgtaacgaagtaataaaaaaaagctgaggagatttctccttggctttttttactattttttgtttataataataatgggtgaaattatgattagaatttgtgcagtaacaaaaacagatgaagtattatatgatgtttctctagaagaaacaaagaaagaccatattgtatggtattggctagatttatataagccaacgaaagaagagtatacatatattctgcaagaccattttaagttccatccccttgcaattgaagactgtatagaatatgtacagaggccaaaagttgatttttatgatggatataactttttagtacttcacgcatttggggaagatggactagaaccgcacgaaatcgatttatttattagtgatcgttatattgtttctttccacttttctcataacaatgcaatcgaaagagtatggaaaacacttggagaaaagaagcgtattaaaaatagtcctttacacgtagctcatacaattatcgaccaaattgtagatgactattttgcgcctgtatattacattgaggatcatttaaatgcaattgatgataatttaacgggggagacagcaggaagtgtattagaagaggtatttgatatacgtacagatttatcaaagctaaggcgtacaatcattccgatgcgtgatttattatatcgtattttaaattcgactcgtttttacggtataagcgatcatgaaatttactttaaagatatacatgatcatttgcttaaactaacagaaatgattgaggcaagccgagagttaacagcagatattcgggatagttatttttcattaaactcacatcatatgaataacattatgaaaacattaactgtattctcgactattttcatgccattaacatttattgcgggagtatatggaatgaactttacgcatatgccagagcttggtggacaatatagttattttatttgtctacttattatggcactaattggcggcggaatgatggcctggttttataaaaaaggatggtttaagtaaaaaaacaccgaggatttcctcggtgttttttttaaccaatagcatgtaatacaaacatagctaaaaataagcatgtaatgatatacatagatggtgcgacttctttacgctttccaagagcaacttttaagatagggtaagcaataaatccgaacgcaatgccatcagcgatactatatgtgagcgggatcataacgataattaagaatgctggaaatccttctgaaaagtcattcagaggaatttgttgaatgcttgtaatcatcagaccgccaataataattaagattggtgcaatggcactatcaggaattaatttgacaaatggaagagcaaacagtgatgcaaagaatagcaacccagtaacgatagacgtcagacctgtcttaccacctgcagtaatacctgcggcactttctactgttgaaacggtaggacttgtgccaaatagaccacatgttattgctgaaattgcattggcttggtaagcacgtgggaatttacgatcatcttctaataaaccgtgcagaagtcccatgttctcaaagataagcaccatgcttaaagagaatgttgcaatccaaaatggtaaggaagaaagtttcccaaatgacatagctccaaacacatcaccgtaattagcgaatgagaatgaactacttcccacttgactcgtatccacaagaccaaatagccaggcgataccagttcctattgcaatcgtccataaaaagtttccacgtacgttacgaataaataatacaagtgcaatgataagagtaagtaatgtcgcaagaacgacaggattacttaatttccccattgccacagcagtatttgggttcgaaacgactaaaccacctttttgcaatccgataaacgctaaaaataatccgatgccgacagtaatcgcttcctttaatgactttggaattgatactgatagcacgcgagcgattggtgtaaaagcggcaattgcaaaaataataccagagataaagacagcagccaatgcttcttgccaagttagtccaagcgtatgcacagctgtgtacgtgaagaatgcatttacacccatacccgggacaagaatagcaggtgcatttgcccaaaatgccatgagtagacatccgacaaatgaactaaaaacagttgctaaaattccagcttcaagaggaatgccagcatctgataagattgacgcatttacaatcataatatatacgattgtgaaaaatgacgtaactccagctaatacttcttgttttggtgatgtttcgtgtaaacctaatttaaatgttctttcaagtattcctttcatgttaaaccttctttttcatatccctctcccacccgtgatatctcttatgtaagagctcaccgttctttattatatcagaacatcatgtttttacaacaagtaaaatgataacgtttacttgtaaagagaattcgttataaatacgtaaaaatagcccgtatggatgaaatgatttctaattcacccgattgaatgggaggggctgcttgcgcatgtaaagtagcataagacgtaacctcccgtggtaattgggcagattcttcaacgaatgagaggggaacaggattaatatttaaattatatgtactcgcaatagcacgagctttttctactgcttggtgcagagcttgaatgagagcttgctcataatatttatttggatgagatactcggaaacgtaaaccttttgctacatttgcgccatttgaaacggctatatcatatacttccccagctttttgtacatttaaaacggtaatttcatacaaatgctccacgcggtatccttgtagcaatgctttatcatttacatattcgtattgaggagtaattgtataagaaatcgtttctatatctttatcggcaataccaagctgtttaagtgcatccagcaattgtttggattgcactgcattttcttcttgagcctgttttacatttttatcatctgttcgaatgccaagcgttaatataacaacattcggttttgctttgacaacgccttcgccttgtacagtaatagtagcttctttaccagtattagctgtgcgtacgttgtgtaaataaggattcattccaccctgcattttccatcaccatcctttttatatgtatatgtgtgaacaaaaaagaaatttatatgaaaaaagttacataaatgagaatgttgaggaaagaaagcatgtacaacataggtatttatagattataatatgtgtaaatatgataaaaaagggacgaggctattgaacgaaaaaagagaaacgctgattttagatttatctgcatcatttcgaaaaatgatacgtttattacaaaatgatattaatacacgttttgcagaacatatgccatataatgaattttctgtattacgtgcgttatttttaaagagtccacagatggcttcgcaaattgcgagtgaagtaaacgtaacctccagtcatattacagctgttacagatcgtctcgtacgaaaaggattagtagaaagaaaacgttctaattcagatcgtcgaatcgtgtatttagaaattacagagcacggaagagaagtaactgaaaaacttgaagctgtgcgtaaagaatattataaagagagatttaaaggttggagcgaccaagaaatagaaatggtcttagaactatttggccgcgtattataataaatgaggataggaagcgaaagcattcctatcctttttcttttgaataaaaatattttgaaactccgatactttaattaaaagatcggaggaaagattatgaaatatattgctgcacttaccattttatttggtggttttttctattttcaaacatttacgtacgcagatacgcctatccaagtggtacgaaaagaagtgaagtacattgaaaccgataatacagtcttatattcgaaattatgggttcgttctatgcaaaacgcagtattattccaccatagcgataatattcgtaatcaggacacattacgtaatgtaacaagttcatcgcttgttaaagcgaaacaactattttttcagaaagcagcactctatataccgagactatcgcaatacgtatcaaaaataggaaaagaaaatattcaagtgtactacattgcgattcactataatgtgaaaaaagaaaatgcatatcaattagatggcatgaactattttctacaagtatttgtgaaagagcgtggggaatggaaaattgctgaaagtgtagttgcaccgacagagcaaattgtgcaaaatggtgatggatttgggatgaaagaagagatggtgtatggggataggagagagaatgtgaaataacctctttatttagatcgggatatataataaaaaagcattgctcttgtgcaatgccttttttatttggttcatataagagttaaataattcataacatatttcttttgtcattatataccttttttgtcagcttctatttaatgtcattgttccgtgtttatagtttcacatctatgatgcttttggaaacatgtatccaccaccttaatgcatatttatttccctacaaaagcaaacttcaattttaatagacgtgtaaaaatgaagtaacttatggtagcgaataggaaaaatccaacataataagacagaagtgcatctcgtccgcctaatattctaccaccaagtagtccgaagcatagaacagtgcaaattatgaaccatttttgcaagttaggaaacaatagtatttttccactttgttcgtttggtgtacgtgtgtatagaaaggttgctattgataaaaaggtaatgatgtaagcaaatggtgttaatagtgtccaaggagaaggtacagaaatacgctccgtaggattgtcctgtggtacactagaaagtttattgccatagtcatcaaatgtttctatcgggtggtaatcataagtaatagaaaaatattctaatggtgaaatgatacctatatgttgtaagtactcatgagtatggtgctctatttctcccattgcatctacagaccattgtgtgtgtgaataaatgaatccggaaattaacaatccaaaaccgtatggtaaaaataatagaatgatagttaaaatactttgagaaaatatatgtccagtaagagtcccgataaataaggcgaatgtataaatagcgataagtacaaccgtagcatatagaaagtaactatagaacggagcaaaggtttgatactcattgtgaaacgacatgttctttattccgtacatgctaatccagcaaacaatttgtactgtaataatattcaaaacaccaagccaccattttgttaaaaaaatatcctttcgtttaaaaggcatcgagaatagaaaatcagttgattgattattacgttcccatccaattaaaagacaagcgagtgcaattagagtagctccttgaaagaagacggcaccatcagatgtctgaaaatagtaggagtagtaatatgcatagtcaccaaacttcatttttgatagttttagttgcatttgcgcttcttgataatatttataaggtagttgatataaactagttaaccaaaataatagaattatatattttccttgcttccattgcctcatccataaagctttatgaaacatgtgaatcctcctcaaatgtagtgataaaaatatcttcaagtgacattgttaattcttcaataagtataggttgctctttgtaaaacttctcgagtgttgtagccacatttccctcaattaagattgtatatacttttcctgtttggtttaatattttaatattgcttaagttttctagcttttgaggtaatgaacgttcgtaagctacttgtatttttgcaaatcgtgattttgcatcgtctagtgatgtaatagacgagatagtatggccttttaatataataattgtatctgcaatttgttctacttcatctaaatggtgagtggagatgaaaatggtaatctctttttctgcaacttctccaacgagaaactgtaaaattttccttttcacgataggatcaagtccatttgtcggttcatctaaaatgatatattctgcctttgtagaaacagctaaaatgatggcgagcagtgctttcatgccttttgaatagctacgaattcgtttgtttggtaagttaaaacgttctaacagttcatagaaatgtgtttcatcaaatgcggtataaacttctttataaaactttacgatttcttttatcgtatagccgttcagtatattagtagaatcaggaacatatacaattttttgctttatttcaggaaactgatgaatgtttgtatcttcatatgtaacagttccctcgtctgggtctaaaataccgaccatcgttcgcaataaagttgttttccccgcaccgtttcttccgagtaatccgatgatactccctctttgcaatgtgaaagaaacattgtctaaaattgtttgactatcaattgttttcttcaagtttgtcactttcaacatccgtattccctccaatctctttatagtatgaatctatccaatcatgaattttatctttcgtaataccaagataagaggcttctaatagtaattgatgaaattgcttttcaaccatagcgattttcctttcgtctaatgttggggtaatcgattgggatacaaatgttccttttcctcgtaacgtttcaataattccttgtcgctctaactcttgatacgctttactcactgtatttggatttataacgagtaaagaagcgagttcgcgtacagaaggaagtttatcacttggagccaacatgtttttcaatacgagttcttttatattttgaacaatttgttcccatatcggagtgttgcttcttgggtcaagttgaatatgcaagagcaatgtctccttcctcatatgtattaagtgtactactgtgagtaatacacttaatacaatataggggacgaatgtatttgtcaactgaaaatgttagaaaaatttggtattaaaaaaaggtaaattggaaaaaataggtctgatatagaatggagggttagtcatgaagcgagtttttggaatacttgtttgtttcatgttattgctttctggaacttcagtgagtttcgcacaatctgagaaaacgaagcaggagaaaacagaagaaacaacaccgaagttagcggaacaagcgtcgtcagcaatcgtaattgagcaagatacaggtaaagttttatttgataaaaacccaaatgaaaaattaccacctgctagtatgacaaagattatgacaatgcttttaattatggaacaagttgaaaaaggaaaactaaaactgaccgataaagttagagcgagcgaacatgcagcttcaatgggtggatcgcaaatctttttagaacctggggaagagatgactgtaaatgagatgttaaagggtattgcaattgcatctggaaatgacgcatctgttgcagtagccgagcatatcgcaggttcagaagaaggatttgtaaatatgatgaacaaaaaggcgaaagatctagggctgaaaaatacacattttcaaaacccaacaggtcttccggccaaagaccattattcgacagcaaatgatatggctataatggcgagagaattgatgaagtatccacttattcgtaaatacacaggtaagtacgaagattatttacgtgaagatacggataaaaagttttggctcgttaatacgaataagctagtacgtttttatcctggcgtagatggagtaaaaacaggttttacgacagaagcgaaatattgtttaacagcatcggctgaaaaaaatggcatgcgtatcatttcagttgtcatgggagcaccaacatcaaaagaacggaacaaccaagtgacgaagcttcttgactacgcatttggtcaatatatgacaaagaaattgtatacgcgcggcgaaaaaattaagacagttcaagtagggaaagggaaaaaagaaaaagtagatttagttgcatcagataatgtttctcttcttatgaagaagggcgagaatatggacaaggtaaaacaagaagtaattgctgaaaagaaagtaaaagcaccgattaaaaaaggtgacgcgcttggtacacttgttattaaaaaagataaagatgttttattaaaacaaacaattgtagcaaaagaagatgttgctgcagcgagctggtgggagttatttaaaagaagttttgggatgttttcaacatcaaaatagcggcaaatattttgccgcttttctattcgtatgtaagtgaataatgctgaaaggtttcactttatgacgaaatagttcttcttttgtcagcaggaaggattcttattttgtatcacgaaaatctttatgtatgtgaataagtaaagtttgagcataaggaggaaatcgtgtgagtctttccatgcaattagaagtaaaacgtgacgtcctatgtgtgagactagagggtgaattagatcatcatacggctgaagagttgcgaacgaaagtaacagatatgattgagacacatggtgttcatcatattgttttgagcctagagaacttatcttttatggatagttctggtctaggtgttatattaggccgatataaacacgtaaagggattaggtggagaaatggttgtttgtgcaatttcaccgcctgttaagcgtttatttgaaatgtcgggcttattcaaaatcgttcgcttagaagaaagtgaagcgcacgcgctcgcgacgttgggggtggcatagatgagaaatgaaatgaaccttcaattttcagcattaagtcaaaatgaatcgttcgctcgcgttacagtagcggctttcattgcacaactagatccaacgatggaagaattaacggagattaaaacagttgtgtcagaagcggttacaaatgcaattattcatggatacgaaggaaatgcagaaggtattgtttatatttctgtaattttggaagaagcaatggtgaaactcacgattcgagatgaagggattggaatctttaacttagatgaagcgagacaacccctttttacaactaaacctgaattagagcgttccggaatgggatttactatcatggaaaattttatggatgaagtagaagttatttcaaacgaatctttcgggacaacaatccatttgacaaaatacttatcaaatagtaacgctctatgcaattaaggagaatagcctatggacatagaggtcaaaaatgagaagaagaaacctcagttaaaggaccacgagctaaaagcgttaattcaaaaaagtcaagatggagatcaacaagcgagagatacaatcgttcaaagtaatatgcgcctcgtttggtcggttgtacagcggtttcttaatcgaggatacgaaccagacgacctatttcaaattggatgtattgggctcttgaaatcggtagataaatttgatttatctttcgacgtgaaattttcaacatatgcagttccaatgattattggtgaaatacaacgtttcttacgtgatgatggatcagtgaaagttagtaggtctttaaaagaaacaggaaacaaaattcgaaagatgagagatgagctttcgaaagaattcggaagggctccaacgattaatgaagtggcagaggcactagaactaacgccagaggaagttgttctagcacaagaagcgagccgggccccttcgtctatacatgaaactgtatatgaaaacgatggagatccaatcactattttagatcaaattgcagatcaatctgaaacgaaatggttcgataaaattgctttaaaagaagcgattagagaactagatgaacgagagcgcttaattgtatacttgcgttactataaagatcaaacacagtcagaagtagcagagcgcataggcatttcgcaagtacaagtttcaagacttgaaaagaaaatattaaaacagatgaaagatcgaatagacgaataattgtctattcgatttttttatgccgttaataggagagagatgttaatttttgcaaaaattaacagaatttattgataatttagtcaatttaaaatataatccaagtatgaacttgtcataaagggggaaggaaacatggaaacgaggcaacaatggggaacgagagctggatttatttttgcagcggtcggatctgccgttggattaggaaacatatggcgttttccttatacagcgtatgaaaatggaggaggagcattctttttaccgtacttatttgcattattaacgactggtatttcattgttagcgtttgagtttgcccttggtcatcgtcatcgtggttcagcaccacttacatttttccgtattagcccgcgtgccgaatttattggatgatggcaaatgtgcgtaacatttatcgtttcaacatattatgcagtgattattgcttggtctatatcgtatacatactttgcaattactggagcatggggaaaagacacgcaatcatttttatttaaagagtacttacatgttgcagataagccagggcaatttggaggacttgtaccggaagtattaattccattagttctcgtttggattattgtgcttggcgttgcatttaaaggagttaaaaaaggaatcgaagttgttaaccgtatatttattcctttattagttgttatgttccttattatcgtcgttcgtgcagtgacgatggaaggtgctatgcaaggactagatgcattctttaaaccagattggagtcgtatttttgatgggaaagtatggcttgctgcttatggtcaaatattctttagtttatctttagcatttggaattatgattacgtattctagttatttaccgaaaaactcggatacaacaaataatgcctttattactggatttgccaactcaggatttgaattattagcaggtattggggtctttgcagctcttggatttatggcgaataatatgggagtaccggttgataaagtagcaagtgctggcgttgggcttgcgttcgtagtatttccgcaaattattaatgaattgccgatgtcaccgttgtttggtgtattatttttcttatcgttaacggttgctggaatcacatcacttatttcactcgcggaagtatgttttgctgctgtgtctgaaaaattcagtttaagtcgggaaaaaaccattggaattatgggaacccttctcgtgttagtttctcttgtatttgcaacacgtggtgggcttatgttcttagatgttgtcgactatttcgctaataatttcggattaattacaattgcacttgcggaagtagtgacgatagggctcattttacgtcgtttaccagtttatcaaaatcatgcaaactttgtatctgatattaaattaggaacgttttggagagtaagtttactcgttattactccgcttatgttagggtatatgctaattgatggtacaatccaaaacattaaaaagaattatggagattatccgactgagtttgttgtaacgtatggttggtcgatagcagcagccttccttatcgttgcgctaattattagtctaaagaaatggaatgcacaaatacattcggattctgccaagcttgaaaaagagtggaaagatcgaggtgtttcataatgagtggatcagcaattatgatgatggttattggaatagtagtcatttggggagggcttgcattaagtattgcaaacttatttaagaaaaaggcataagtaaaaaacatctgtaccgaaatggtgcagatgtttttttatgaaaaaattgtattagaaaaaaattcaataaccatactacaactacgaggaagagtgaaggggtgaatgaaagttggaacaaacgatttatattaaaatgcgcaatcgtttaaaagtttctcctacttatgaagtaaagctgggcgatgttgctcaacttgccggagattcttccgtagttgagttgttacaaaatgagatagtttacaaaataacagcgcatgataagacgcatgttgtaattgatgttatgaaagtaattgagattattcaacagaaagcatctcatctacaaattaatttactcggttctggacaaactcttgttgaaattatatacgaaaaaaagaaggcacacccaatttttttcgggcttgtatggctattacttttcattggagcggcccttgcgatcatttatttccatgaagatgtaagtatgcaacaagtacatcaacggttatattacatgattactggagaatttaatgcgcaaccacttttatttcaaattccttattctttaggtcttggtttagggatggttttattctttaatcatgtatttcaaaagcgaattaatgaagagccaagtccgctagaagttgagatgtttcaataccaacagtcacttgatcagtatgtaatcgttaatgaaaacaaggataatatgaaacaacttaccgatgattgagtatggatttgttattttaattggtttagctggagggattgcggtaggtagcggatatgtcgcatttttagctgtacttggtataatcccccgtttagcccaattaacgagaagtggaaagcatattcaatattttgagtgggcagttattgcaggtactttaacaggggcttggtgcagtttgaaaaacattacatttcaaacgtcgcaatattggctcgttatattagggatattttgtggcacgttcattggaatgcttgctgcggcattaacagaggtgttaaatgttctacctattttagcgaaacgagtaggggtagagggcaagattattgttttactcgttgctattgtacttgggaaagtaataggatcgttgtttcactggatttatttcgtaaagtaggaggcagtatataaatgacaagtcagaaattgaaggatgattacataaataaagtgaaggagtatcatccaaagccaaactatttactaaattgtatcaaagcatttcttgtaggtggactcatttgcacagttggagaagcattgatgaaattttatatacattattttcactttagtgaacaagaggcaggaaacccaactgttgcaactcttgttttattatccgcgattttaacagggtgtggtgtatatgataaaattggtcaatttgctggagcaggatcagcggtaccggtaacaggatttgcaaattctatggcgagcgctgccttagaacataagagcgaaggggttgttctagggattgctacaaatatgtttaaactggcaggaagtgtgattgtatttggggttgttggtgcatatatcattgggttaataaggtatacctttaaaatttttatgtcttaaaggaggggctagtatgaggttgaccggaaaacaaacgtgggtatttcaaaatgatatatatgtaaatgcaacgggcactgctgtcggtccgaaagaagctgagggccctcttgggaaaaaatttgatatttcatatgatgacttgcattgtggagaagaaaattgggagctcgccgaacgaagattaatgtcagactcaattcaacaagcggtgcaaaaagggaatataaaaacatcgcaaattgatttctttttagcgggagatttattaaatcaaacagtgacagcaaattatgttgcgcgtaagtggggcattccttttttaggaatgtttagcgcttgtgcgacgtctatggagactttagcagttggctcagcttttatagacggtggatttgcaaatcgtgtcttagctacagtaagcagtcataatgcaacggctgaaagacaatttcgctatccaacagagtatggtggacaaaaaccagggacagcaaattcaactgtgactggtgcaggatctatattaattagcgatgaaaaaagtgcaattaaaattacgtcagctacaatcggaaaagtgcaagatttaggaatcacaaatcctttggatatgggggcagcgatggctccagcagcagctcatacaattcaacaacattttgaagatttaagaagaagtgccgatgattatgatttgattgttacgggtgatttatcagctgttgggacgccgattgcgaaacaacttttacttgaggaaggttatgatcttgggcatatatacaatgattgtggattgatgatttatgaagcaagtcaagaagaagtgtttgcaggtggtagtggttgcgcttgttcagcagttgttacgtatggtcatttattacacgagatgcaaaaagggaatttacaacgaatttttgtcgttgcgactggtgcattattaagcccaatgatgatgcaacagaaggaaacgattccaacaattgcacatggtgtcgtatttgagagagttaaaggagagtgaattgtggattttatatatgcatttcttgtaggtggagctatttgtttaattgggcaactattgttagatttcgtaaagttaacaccagctcatttaatggcaacttttgtagtcatcggagcaattttagatggatttggattatacgataaactaataaagtttgcaggtgctggagcgacagtccctattacaagttttggacattcactattgcacggagcaatgcatgcagcagaaaaacatggatatttaggaattggtattggcatgtttagtttaacgtctgcgggtatttccgcagcgatattgttttcattttttatagcacttatatgtaaaccgaaaggataaatcaaatgagacgaagggttgttttggtcacagatggagatgaatatgcaaagcggacaattgagcttttaacgaaggaatttgggggaaggtgtatttcagcatcacaaagtaatccaaccaaattgacagggaaaaaagttgttgagcttattatgcaaacgccatatgaccctgtatttgtcatgtttgatgacagtggatttattggagaaggatctggtgaaaaggctttaaaatatgtggctacccataaacaaattgatgtgctcggtattttagcagtagcgtctaatacgcatcattgggaatgggcacgtgtagatgtaagtgtagatcggaacgggaatttaaccgaatacggtgttgataaatttggacttccagatggtgaaattggcaggattagcggagatacaatatattgtttagacgatttaaatgttcctgtcattgttggagttggtgatattggtaaaatgtgcggaaatgatgaatgggagagagggtcacctattacaaagaaagcaattcaattaattttagaaaggagtggattttatgacgaagcctaaaaaagtggatatccctatatcaactttcataagtgacaatgaaaattatttaaaacagacagttggactaggcgttacatacgatgttggcattcgtaaatttcaaattttgaataaagaaattggtgtgttatttgtaaacggactttgtgatacaaattatattatccatattttagaagaagccgtggatacaaatgagataagggatgtagaagaagatacagttaagcttttagagaatcgcttaatccatcaacaagtaagcaaagtgaaaacgatggatgaggtaatgctccaagtattatcaggactcattgtgatatttgtagaaggtgaaacggaagcgttcgcgatcgatgttcgtagttatccagggcgaacaccgacagaaccagataccgaaaaggtagtacgtggtgcgagggatggatttgttgaaaatatcgttgtaaatacagcattaattcgtagaagaattcgagatccacgccttcgaaatgaaatggttcgagtaggagatagatcgcaaacggatatttgtattacatacgtacaagatgttgcaaatgcggatttagtaaagattataaaacaagaattaaataacattgatgtagatggaattacgatggcggataaaacagtggaagaatttgttgtaaagcaaagctataacccattcccgcttattcgatatacagaaagaccagatgtagcagcaaatcacctactagaagggcatgtgttagtactcgtcgacacatcaccaagtgctatgattacaccgacaacatattttcatcatttacagcatgcggaagagtttagacaaaatccagctgtcggtacatttttacgctgggtgcgctttttaggtgttatattttcgttatttttattaccattttggttagtgtttgtatttgatccaactcttttgccagcaaatctggcttttattggaccgactaagatgacgcatttaccaattttattacaagtgttaatggcagaggtcggacttgagtttttaaggatggcagccattcatactccaacgccgttatcgtctgcagcagggttgatttccgctatattaattggtcaaattgcaattgatgtaggtttgtttgtgccagaagtaattttgtatgtagcagtttcgatggttggtgcatatgcaacaccgagttatgaattaggattagggaataaggttgggaaattgtttgttattattttaacaggtctcttccatgagatgggatttgtaattggtatgacgatattaattttatttttaacgtctataaaaagtttacaaacaccttatttatggccgtttttaccatttgattggggcgcgttaacaaaaattttactccgtccaacaatgtctagtttaaaagtacgaccaagtattgtaagacctcaaaatgtaaaaagacaaaaataaacgggattatacacccgtttattttttttagcaaaaatttattattttttaacaaaaatcaaacattttttgtgtacacttagagtagatattgtgtatggaaggggaagaggacatgattaaattatttgtaagtgatttagatgacacgctcgtttacgatgtgaatcatatgcaaaaagaagatgaacgtgcgctgtgttggttagctgagaaagggacaaatatttgttttgcctctggccgctttacacacagaattgatgaagttgtaaaaaggttttcattcccatattacacaactggcttaaatggagcgacaatgttacttccggatgggaatttatttcatgaatcgagttttgaaaatacggttgctcaggaaatatatcggtatatacataaaaaaggactagcggatattgtttgtgcaaatgagcagcgatatacaaaaaggaagaatgaacatcaccataattttgaagcatatatgggcgtgcatatcgctgaaattgaagcgttagaagaagagtttggtaagactgtacaccctgcaaaattgtttgtttttggagaagaagagaaaattgtgacgttagatcaagagctacgagatacgtttcaaggcgaagcggaagtttttatatcaggtaaacgctatgttgatattatgccaagaggcgtgagtaaggggagtgctctaaagcgactaatggatcatttgcaaattgaagcaaatgaagttgcttgtattggagattctttcaatgatatttctatgtttgaagtaaccccacattcatttactcttcatcatgcccatccatatgtaaaggagaaagcaaatcacatagtgcgttcggttgaagaggctgttatgaaattaccgttacttgtataaaaaagaagcccgtcattggcgggcttcttttttacttgaataaagatttaacaaaatcaatgatacttgagaagaaatctttcactttatctagaaaactttgcccttcttcagatcctaaaaaggcagaaacatgttcttttgctttgtttaattgactaccaacttgattccaatcgatattaagattcttcattttatcaaataacgatactaagttatctaactgttcatctgttaatgtaatgccgagttggtcagcaatttttttaattaatgaacgtaaatcttctgttgtttttggctgttcttttgcaatttcttctttaatttttgcaacaagttgaactgctttttcttcaccaattttatcaccaagctgggctgtttgtaccatttcttcattcgctacttttttaacttcttcaggaatttgtttattggacgcagtttcgtatgctttcattaatccagttaaagctgcagttcctgaaactttaaaaggtgcagtaatttgaatttctgcatcttttacacctgctgtaatcaaagcgttagtgtacattgcatctgttacccagttaatgttctttgatcgtacaataagaccagatcctggttttgtgtatgtaatcatagaagaagaaattgctctcgtaccaatttgtgcttttggaacaatgccttctagaaatttatgttcttccgcattagatacagtgataattgtagcatcttttggtgttttcatttcttttaacagatcttgtttttgttgttcggataagttctctcctaatgtaacaattgattctccctcgatgatgtctgcaaatgaagctgttggcatcataaataccgttacagctaatagcagagctaataatttcgttttcacgaaaaatcgctccctttctctttctaaaattttcgggcaacaaagttattatagtatatatttcttatttgtcacctagctttttccacatttcaaaaaagaagtatctagattgtcggattctttttgtttctagtcatgaatgtggtaatatagtgctgagataattgaaaggagacatatacgcatgaaaactttaggatacatattaatggaaaacggtgaaaaaatcgacttggaatttttcccagaagaagcaccgaaaacagtagaaaactttaaaaaattagcagagcaaggattttatgatggtgtgacattccaccgtgttattcctggcttcgtaagccaaggtggagacccaacaggtacaggtgcaggtggcccaggttactctattccatgtgaaactgatggaaaccctcatagacaccttgtaggatcactttctatggctcacgctggccgtaacacaggcggtagccaattctttatcgttcatgagccacagccgcatttagatggtgttcatactgtatttggtaaagcaacaagcggtattgaaacagtattaaaaatgcgtcaaggcgatgtaatgaaagaagttaaagtttgggaagaataaggtaaggaaaaagagagcttttgctctcttttttatttttaatgagattgagtacttcttctacagctcatcatacaagtagtattgttgctaaaatatattgcttgtgagaacaaacctttaaccaattacatagaatacattacattatatgtttcaataaatattttttgttatattaattttgctagaattgtgctgctttagggtaactatgaatgaagtgctgttgaatgatatgtttctttccattccatataaaattttctttttttaactctatttattaaaggaatagtgctgaaacatagatttgactttcttcttttcgctttgtatgattatcaagttgttttagactcttctcactctgttgaaaatattgtaaaatgaatgtgatatgaaaagagtgattgaggggattactagtttgtaacttttgtaagaagggataagggttatgttaattcgttttaaaaaaagttatgaaaaaattgcaatggggcttctttcgtttatgccaactgaaaaagatgtgaaaacattacaattgacaatgaaagaatatgaagcaaaagatgattggcaattgtatttgtggaaagaaaatgaagattttgttggaataatggggattgtaaaaaaagagaatcaagtattagaaattcagcatttgagtgtgaacccgtctcaccgtcatgtggggattggaacgaagatggttcaagagttaaagagtaaatttcttgagtttacaatttgcggaaatgagcaaacggcaagtttttgcgaaaaatgtaaagggctagaacaaaatatacattcgtgaaagcagagataagtagtttattatctctgctttcttttttgtaattgttcgtttcgttcagtaatgacctctgtgcgatcacgcaaagtgtgcttgtttataatatattcacctgggatagcattcaagtctttccaagagaggttttgtttttgacataactctatgcactgcttctctaacgatgaatctgataagggtaaaaataaaggtacaaaacgttcttttttatggatagattgcaatctttcattgagcaaggaaagaagttgtacttgattaattcctaaacgttgtaaaggcacaccgcttttttctaaaattgtgattgcgcttttcatcatttttgtggaaccattccaattagcacgtctttggtggtataaagaaactgcgatttgaatgagaccaactaagtaatgatcacgattacctcttggttttgttttccaatactcttctagtatttcgtggcattcaaaatagtcataatctccatggaaatgaattaaaaattgtatgtattcggtaggatacatgttttctcgctcctatctaacggttatacatataagtgtatcatagaaatatgaacaataaacgactaggaggtttccccctagccgttattgttcatattagcagaagcaagctgctcctacaataattagtaaaataaacagtacaacaagtaatgcgaacccaccgctaaaaccacaatcaacgtgacccatagttttttgacctcctacattgttcttactacactgttatcatatgaagtggtgggcatgatgacataggcatcggtctatttttaattaaatttcttaaaaaggttggatagaacatgagtatgctctatacttatgttgttatagaaaaaatgtggtgggatgctttgtgcaatataattttaaagtagaggcttttgaagggccgttagatctattgttacatttaatacatcgttatgaaattgatatatataatattcctgtagcagatattacagagcaatatttatcttatgtgcatacgatgaaagaacttcaattagatgttgcaagtgagtatttagtaatggctgcaacgttattacaaattaaaagtaagatgttgttgccgaaacatgaagaagatgtacttgataacggtgatgattttatagatgatcctcgtcaagaattgatggagaggttaattgaatataagaaatataagcaagttgctactgagttaaaagaaagagaacaagaaagagcacagctatatacacgtccaccaattgactttacatcgttgcaacaagaagaggagacaagcttacctcttgatgttacgttatatgatatgctagcagcatttcaaaaattaatgcgccgtaaaaaggcaaaaaaacctgtaacaacacgtattactcgtcaagaaataccaattgaacagcgaatgactgatattttaaagcagttaaaaataaagggtggtcgccaaagtttttacgatttgtttgttgatgatgaacgtgaaataatggttgtaacatttttagcagttctggaacttatgaaaaatcaacaaatcataattgagcaagaacataattttgatgaaattttcgtatcaagctctaataaatctgcatagagcaagtatgtgaaaatgggatagaaacattttatctcatgctatgttttaatgtatcgtttggaacaagagaaaaaatattgaaccgaacgcattaattgtgattcggttttttgatgtgtatttttatgggaaaatagaaggaaggagctcgtgaaatggataggaaagaacaaaagtcaattattgaaggccttttatttgtttctggtgatgaagggatttatccagaacaaatagcgaaagttcttgaaattgaaatgaatgaagtaattaatattttagaagaaatgcaacaagaatgtgaaggtgcaaaccgtggtttgcaaattgtacagtatgcaaaagtatatcgttttgctacaaagaaagaacatgcttcatattatcaaaaattaatagatacaccaacagctgcttcactctcacaagctgccctcgaaactttagcgattgttgcatatcgccaaccaatcacaaggactgaaatggaagagattagaggagttaaaaccgataaggcgttacaaacgttggtttcacatttacttataaaagaaatgggaagagcagaaggaccagggcgtcctattttatacggaacaacaaaagaatttttggacacatttggattgaaaacattagatgatttaccaccgctttctgaagagaatgaacaaatgaatgaagcggatttattcttcggttccttacaagagatatcgaaataaaagcttagcattttgctaagctttttttgtatatcaattatttacagtgccatactaaatgaaaaaaggagacgagttatgagaagtatgcggattattttattattagtttctgttttattatgtttttctttaaatagcgcatcagctaaaaggtatatgatgtccattcatactacgtctcctttacatatgcatcggcaacatcttagtaaaatgaaagtgagctttttaaaagtggggcaaggtgacgcaacacttattataatgccaaatggacaaacaatgttaattgatggaggaccttatgaagcaggagaggttattattcagaaattaattgagaaagggattaatcatctagatgtaattgtcagtacgcatcccgatatggatcatataggagggttaattccaattgtagagcaaataccggtatcgcttatattagatagcggaaaaacatatagttctcttacttatcatacgtatcggaataatattaaaaaaagagggatacctttcgtttcagtaaaggaaggacaatatataccgctggatccacatgtttctatacaagtattaaacaacgggaaatcaaaagatgaaaataatgaatcctcaattgttttaaaggtgcgatatggaaaagcggattttttattaatgggtgacgcggatgtacgaacagaacatgaaatattaaaacaatttgatgtccatgcagatgtgttaaaagtggggcatcacggctcatatacttcaacaagtgaaacgtttataaaaaaagtggaaccgcagtttgctattttgtcgtacgggagtagtaatccgtatggacatcctcaccaaagtgtagtgaaacgcttaaaaaggcacggtataatggtatatagaacgaataaacgtacagtagaaatggaaacagatggtgaacatattatgttagagtctagcgggttaatgccattattgaagtgatttctatattagggggcgatactgtccctttttggaaaaatgaataatatatattataattataagagacgtaagaaatttccttttctgttgaataaaaaggaaattttattagaatgtatagacaactactcgtgtgtatattaagatggaactaggcgaataaggtaataataacaagtaggtaattcatgggaaaggatcgatgaaaatgaaaacgcaaattgtcatcaatgccaaaatttacacaggtcaagaaatagtggaaaacggatttattcgttacgcagaaaccattaaagaaattggtttgatggctcaatatgtaccacaagaaaatgaaactgtttttgatgctacagggaagattgtaattccaggtatgatcgatgttcatattcatggtggatacgatattgatgcgatggatgcaaatagcgatgggttagtaactctaggtaaagaaatgttaaaagaaggggttacaacttacttcccaacaacaatgacacaagctccagaggcaattgaagcagcgttaactgctgcaaaagaagcaaaagaaaaaggagcgcattttgaatatattcacttagaaggaccttatgtttcaaagaaacgtgcaggtgcacaaccacttgaacatatcgttcctgcaaatattgagcaatttaaacaatggcaagaagcaagtgggaatttaattaaattagtaacatatgcaccagaagaagagggagcattagagtttgaacaatatcttgctgaaactggtgtagttggcacaatggggcatacagatgcaattgatgcgcaactaaaaaatagaaagattacacatgcgacacatttatacaatcaaatgcgtggattacatcaccgtgaaccaggagttgttggtcatgtgttattaaatccagatgtaatggttgaagtaattacagatggcattcatattcaccctgatatggtgaaattagcatataagttaaaaggaccaaaaaaagtaagtgttattactgacgcaatgcgtgcaaaaggtcttgaagatggattatatgagcttggcggacagccagtacatgtaaaagatggtagtgctcgattagaagatggaacgttagctggtagtattttaaaaatggatcaagctttccgaaatgtaattgaatttacaggttgttcaatcgaagatgcagtactgatgacatcagttaaccaagcagaagagtttggattaaataataaaggtgcattagcggtaggaaaagatgcagactttgttgtgatgaatgaagatttacatgtatatgatacggttcgtttaggaattcatatgaaggaagggaagtaattaaatgaatattcttgttgtaaaaactccagaagaactagcagaagcaggttataaattaattgaagaagttgtaaaaacaaaagaaaatccaacattaggaatggctacaggaagctctccattaggtatttatgcagaaatgcgaaaaaataaacttgatacaagccgtgtaaccactgtaaacttagatgagtacgtaaatttaccacatgaagataaaaacagctatcactatttcatgcaagaacagttgtttgatcatcttccatttaaacaaacttatgtaccaaacgggatggcaagtgatttagagaaagagtgcaaacgttacgagggcattctagctgctaacccagttgacctacagattcttggaatcggtgaaaacggtcacatcggatttaatgagccaggaacaccgtttaattctccaacaaacattgttgaattaacagaatctacacgccaagcaaaccttcgcttcttcgagaaagaagaagatgtgccaactcatgcgattacaatgggaattggaagcattatgaaagcgaaacaaattctactagttgctatgggttctaaaaaggcagaagctgttaaagaattattgcaaggtgaatatagtgaagagtgtccggctacagttttacaacgtcatccgaatgtaaccgtaatcgctgatcaagaagctctatctttatgcagtgaggcgattgctgatgaacatcgacaagtattcaccatttccgatctattatcagattcaagagtgggtgaaacagctaattgaggacggcgaatggaagccgggagataaaatcccatctgagaatgaactttgtgataagttcgaagtgagtcgaatgacaatcagacaggcgattaataatttagtggaacaaggctatttatatcggaagcgtggaattggaacatttgtccaacttccgaaagtggaacaaaaattgcaaggaatgacgggattcacagaagacatgatttctcgtgggatgaacccaagtagtcaattacttagtttccgcctagttccagctactgctaaaatagcagaccggttgagaatacaggagggggaatcggtttatgaagtgaggcgtattcgcttagctgatgatgaaccgattgcttttgagacgacatatttgtcgccagctcttgtaaaagatattaacgaagagatattgcaacaatctttatatgaacatttagagaaaaaactgggctttaaacttgttagcgctactcagtcaattgaagcttccgttgcgacggaaaatgaagctgaacatctgcatattcctaaaaaggcgcctgtacttgtaatgcgtcaatggtcatattcagaaggtgaggtaccgctagagtacgtgaaatgtatttatcgtggagatcgttataaatttattacgaatatcgcacgtaacaaatagtatatttcagtttgtgaagtacagtggaattgaaaatggttaacatgtaaagaaataaaaatacgactcatccttataaggaatgagtcgtatttttattatgagcaattacgtggttaacagcatctttgacgtgatttactacatagtgagcgtgattttttactgcatcatctgcttgtgacatagcaaaactgtgaggagttaaagaaaacataggaatatcattgtaagaatcccctatacaagcaatttcctcaggttttatttgaaactcatttaataaaacagaaatggcagagcctttactaacattcggtggcattacatctaaacattgttctgctgagatgaaagtactaactttcccgtggaatttttcatcaatttttttctgaaggagttgtaagctctcctttgttccaccgacagaaattttatttgggaaaatcgtatcatcaatcttctgtagtaagtttggttcttcaacagaagtcatagttacttgttgttcaagttcttgaataaaaggtgttttctcttcaatgtaataattatgctcatcacttacataacggaaataaggatcttcattcgtcatagctaacaaatcgggaagtatgctggaatcaaaagttgcagataatagttgtttattttcatgtgtatatacaaaaacaccatttacactaatgcgatgaaaatttgtatttacagctttcattaagtctgcaatttcattatcaagtcttccggaagcgaagcaaagaataacattttgttcggcaaggctgcgtagtgccgcaacatcttgttcatcaataagacctccgtgttgcatcattgtaccatcgatatcacttacaaacattttaatcatgctgttatctcctttctatgtacagttgctcttacattatacgcatcatatataaacatgtctaaaaaatgaatttttattaaatggcagatgttttacattgacgacaaagaagaatattctgtaacataaaagtaggctatttaagtacgagggtggtgttatatgagtaattatctagaaattaaaaaagttttaaataataatgtcatcattgctagccatccggaacacgaggaagtagtagtgattggcaaaggaattggatttgggaaaaaagcgaaagatgtattggagcaagaacaaatcgaaaaaatgtttgtcttaaaaaatgaacgtgatcgtgaacaatacaaattattagtgccgcatattagtgaaaaattaattgaattgatgaacgatattatgctgtacattcaagaaaaagcgaaatctccactaaatgaacatattcatattgcgttaacggatcatatttcatttgcgattaaaaggttaaaacaaggacttacaattgataacccttttttagttgaaacaaaaatgctctatccagaggaatatgaaattgcggaaggtgttgtacaacttttaaattctcgtttgcaaattacattgccagaaggagaaattggttttattgcacttcacatttacagttcgcttacaaattctgatttatcttcagttaatcaaaactcccgtctcattgcacaacttgtatctttaattgagacaaacttacaaattacattagaccaagagagcattcattatttacgccttattcgtcatcttcaatatgctattgagagggtgaaaaaaggagaaaaagtagaagaatcgcaaagttttgctgatttattaaaggcggagtatccagtttgctataacttggcttggaagctagttaaggtcatgcaaaatgagttgcaactacctgtatatgaagctgaaagtatttatttaacaatgcacttgcaacgcttagtgaaggcagagcatgtgtaaaaagtcatatatttttgtctaaaatgaaaacgttaaaaaaaatgattgaatcgcttacaatagttatgtataataactattgcaaagttatacaaatttcgacaaacacattaaggtgagtaacgaaaacgtttgccttaattatagtgaacttatacgtaaacctatttttgacacgtgttactgattcgatcaggcatgagtggagaaaagtaaggaatgtaagctagagaaagggatatactaccctttgtatagctatcgttctatctttttttcctcatgtctttttggcgtttgtcggaaggtatcaatatagataagagaggaagggtttccatgtttaagaagatctttggtgttcttcaaaaagtcggaaaagcgttaatgcttccagtagcgattttaccggcggcaggtattttacttggatttggtaatgcatttcaaaatccacagttaacaaatattattcctgctttaaaagcagattggttcgtaatggttgcaaaaattatggaacaatctggtgatattattttcgctaaccttgcattattattcgcagttggggtagcaattggtttagctggtggagacggagtagctggtttagcagcattcgtcggctacttaattatgaacaaaacgatgagtgtgttcttagaagtagataagctagtgaaagtaacaagttctggagcagacccagtaaaaattggatttgcagatccagcgtatgcaaacgtattaggtattccaacgctacaaacaggggtatttggtggtattatcgtcggtatagtagcggcatattgctataataaatacttcaacattgaattaccatcatacttaggtttctttgcaggtaagcgtttcgtaccgatcgcaactgcaacattctctttaatagtaggtattatcatgtgcttcgtttggccatacattcaaggtggcttaaacacgttctcacatcaaatgattgatgcaaatagaacaattgcagcatttatattcggtttaattgaacgttcattaattccatttggattacatcacattttctattcaccgttctggttcgaattcggtcagtatacgaatgcagctggcgaattaatccgtggtgaccaaaaaatctttatggcacagttaaaagacggtgtagaattaacagcaggtacatttacaactggtaagtatccgttcatgatgttcggtcttccagcagcagctttagcaatgtaccatgaagcacgtccagaaaataaaaaattagcagcaggtattttaggttctgcagcattaacatctttcttaacaggtattacagagccacttgaattttcattcttattcgtagcgccagtattattcggaattcacgctgtatttgctggtctatcatttatgacaatgcaaattttaggtgttaaaattggtatgacattctctggtggtttaattgacttcctattattcggtgtactaccaggccgtacagcatggtggtgggtaattattgttggtcttgtactagcagttatttactacttcggattccgctttgcaattcgcaaatggaatctaaaaacacctggtcgtgaagtggcaaatgcaaatgacggcgcaggaaaagcagaagcaggcgaacttcctcgtgaagtattagtagcacttggtggtaaagaaaacattgcttctttagatgcttgtattactcgtttacgtgttcaagttaacgaacaaaagaatgtaaacaaagaccgcttaaaagaacttggagcagctggtgtacttgaagttggaaataacattcaagcaattttcgggccgaaatctgacacattaaaatcacaaattcatgatattatgtcaggtcgtacacctcatgttgaaaaagaagaacctgtaaaagtggaagaaactcctcaaaaagttgatgaaaatgaaacaattgtatcaccaatcgaaggaaaaatcttaccaattacagaagtacctgaccaagtattctcaggaaaaatgatgggagacggatttgcaattgagccaactgaaggaacagtagtttctccagttaacggtgagattgtcaatgtattccctacaaaacatgcgattggtattcaatctgaaggcggaaaagaaattttaatccacttcggtattgatactgtaaaattaaatggtgaaggttttgaagcgcttgtagcacaaggcgacaaggtgaaacaaggccaaccattattaaaagtagatcttgcatttgtaaaagaaaatgcaccatctatcattacaccaattgtctttacaaacttacaacaagggcaacaagtcgaattgaaaaaagatggaaatgttaagaagggcgaaaccgctattattgacattcagtaggaatttgacgcaaaatgtttataattataataggcgatgtggttgaccgaacatcgcctattatatacaatagatgatgtagtactcacatctatacaactaaaaaatactgtaatttaaaggagataaattatcatggaaaaaatctttaaagtaactagcgactcaggaattcatgctcgtccagcaactctacttgtaaacactgcaagcaaattcggttctgacattaacttagagtataacggaaagaacgttaacttaaaatcaatcatgggcgttatgtctttaggcattcaacaaaacgcagaaattaaaatcactgcaaatggtgatgatgcagctcaagcactagcagctatcgaagaaactatgaaaaacgaaggattaggagaataatgactcttaacattcaagggatcgctgcatcaagtgggattgctattgcaaaggctttcagacttgaaaatcctgaatttaacatcgaaaagaaatcaattacaaacgaagctgcagaaattgcacgcttagacgctgcgcttgaaaaagcaaaaactgaattagaagctattaaggaccacgcatttgctgagctaggtgctgacaaagctgcgatctttgaagcacatttattagtattaaatgatccagaactagtaaacccagtaaaagataaagtaaatagcgaaaaagtaaatgctgaatttgcaatggatgaagttgcatcaatgtttatttctatgtttgaaaacatggataacgaatatatgaaagaacgtgctgcggacattcgtgacgtaacaaaacgcgttcttgcacatttactaggaattaacttctcaaatcctggtacaatttctgaagaggtaatcatcattgctgaagatttaacaccatctgatacagctcagttaaaccgtaagtatgcaaaaggtttcactactgatatcggtggacgtacatctcactctgcaattatggctcgttctatggaaattccagctgttgttggtacgaaagttgttatggagaaaatccaaaacggcgatatcgttatcattgacggtttagatggagaagtaattgtaaacccatcagaagaaactcttcgttcgtttgaagaaaagaaagcgaaatttgaagagcaaaaagctgaatgggcaaaattaaaagaccaagctactgtaacaagtgacggacatcacgttgagcttgttgcaaatatcggaacaccaaatgatgtacaaggtattatcgataatggcggagaaggcgttggcttataccgtacagaattcttatacatgggccgtgacaatcttccaacagaagaagagcagttcgaagcgtataaagcagttcttgaaggtgtaaaagaaggtcaaccagtcgttgttcgtacacttgacatcggtggagataaagagcttccatacttacatttaccaaaagaaatgaatccattcttaggataccgtgcaattcgcttatgtcttgatgaacaagatgtgttccgtacacaacttcgtgcattacttcgtgctagcgtatacggtaacttaaaaattatgttcccaatgattgcaactcttgatgagttccgtcaagcgaaagcgattttattagaagagaaagcgaaacttgtagaagcgggtacaactgtttctgattctattgaagttggtatgatggttgaaatcccagcttcagcagtattagcagaccaattcgcgaaagaagttgacttcttctctatcggaacaaatgatttaatccaatacacaatggctgcagaccgtatgaacgaacaagtatcttacttataccaaccatacaacccatctattttacgtcttgtaaaaatggttatcgatgctgctcataaagaaggcaaatgggctggtatgtgtggtgagatggcgggcgattcacttgctatcccattattattaggattaggtttagatgagttcagtatgagtgcaacatctattcttcctgcaagaacacagctaagcaagttgtcaaaagcagaaatggaaacattagcagaaaaagcattaaagatgtcaactgctgaagaagttgttgaactagttaaaagcatataattaataaaaaaacctgagccgatttgaaatcggtctcaggttttttctatgagaaaagtaaatcttatttgcttactattgaggataagagacagaattagatagcgattgcaacgatatcagttgggcatacgcgtaaaataccagtaaaagtatttcgattttgattgttcttatcgtctttattgttatctttgttatctttgccattacgagctaaagcagagaaaagagcaacaccgttacagaaaccttcaaaaattacattgttgaaagtaccattacctctaatgcttaaaagagaaagctctgttccaactgaaatgctagcaagtacgttacatacagctggttgttgtggtctaactacttctctctctttctcacgatggtcgcgatggtcacactctctttcacgatgatgacagtctctaaagttatcacagcatccaaatgatccaaacataatcctcatcacccccttcacacttataatctatgtaagttcggtagttagtgactggacagagagtggaattttttctaggggattttctcattttaaatgactagctgggtgtttagtatggaatgatgtttaaaataggggagatataacaaaaaatgtaaaaaccaccgaaataaatgaaatgggtagcctttacacttttttacttttatataaaacgatgatatatacgggaagagctaggagtaatggtacaatggatcgtgcagtgtgtttttctgattctaattggaatgcttcttcttttggaaattgtaaaatggagatgtttgcggcatcaccaataaaatatagaagcagtacagttactatgtaacataaaagtgcgataaagcttccgtatgaactcaatgaaaatccctctcttgttatctatttgttatcattgtatcacaattgtaacaaaaatacacgggtatatttcaatgccttaacaaaattcgacacgaaacgtcacgtttatttatgataagggaatagaatatacttttccataagtataaatgtcgaatgatttgtagtaatattacaaaagtatgacagggaataaaaaaacgaaggcaatgtagttgccttcgttttttattattttgcccactcgctcacttgctctacgctcatgcgaggtgcagggtggccttttaaagttgattcaccaattgtaataagcataattggaacgtaacgagatgaaacgttaaattcgtctgtcagtgcttgtgggttgaagccaccaatagcacaagtatcccaaccagttgctttagctgcaagcataagttgcattgctgctaaagatgcatttgaaaaggcagcatctcttgggaattgttcacgagcatatgcagattcaatatttttagctaagcgttcttttgcttcttctttcataaatccttgttctacaattggaccatatactggctcaacatttttataagcttctaaatcacctaaaatagcgactactgcagaagcatcaagaatttgttgttggttataagctattgggtgtaatcgtttttgtacatcttcaccttgaaaaacaaggaatttccagtgttgtaagttccaagcggaaggtgcttgtgctgcggcttttaaaatctcatgtaattctgtagatgagatttctttatttgggttaaatgcacgtgtagatgtgcgttcatatagaacatcaaaaaagttgtcgtttgtcattgtatatcctccaaattgtatatcgaattattttcaaaaaaataatatacactacttacattttgtaagttatcgaatttaagaatataatatctttattttaattgtcaagttttaaaaattagctagggcattcatacaaacgatacaattcctacaatcatacactaaaaaaggaatttatagagtgaaaagcgaagataacattctcaattagcttgttaatatgtatctctcacaaattaaagtttattggagaccagtcttttaaaaaagtttgtgaggaattcagtagaacaagatatatgaagtgagtgaagactagtgatgaacatactacattttttattagagaatacggttttccaaaatgtgttacaagatctgcagttaaatgtcctttatatagaaaatggatgtaagcatcaacaaacggtagaaaatatccatccaaaatgtatgtttatagcaaatagttttgaagagggcgaactattatttcaaagaacgaaaccacacattatcattacgtatgtaacagattattctcaaataaaatatataaagaatatgtatactccgcacagtacattcattgtcatttgggatcaacaaataacaaaagaatttacagatgtacttgcattaggaatacgtaatattgtaatagctcctgtaactccgcaagcagtgttagaggaagtgaataagagtttgtatcaactttctttagtaaggcaagttagtttgcagcaggaattgcttcaaacgatgtttgattttcaaaatgatctattatttatagtagaagatgatgaaatagttgattgtaatacaaattttttagcttttttcggatatgaaaatttgtttgcctatcgtgagcaacatttggtatttgctgaacattttattagagaaaatggatactactcgacgacgcatgatataacatggctagacgatactttatctagtggtagaagaattaagatgttaaattatgaaggggcagtatctacttttctattacgtgcgacaccattgccagaagatttatcaagatttattgtaaagtgcacggaaattacagaattagatgaaatctatcaagaacaagaaagacttgctatgatagattcattgacagagatttataatcgtttaaagtttcaacaaatactagaggtagaatgggaaaaggtaatacgtagtgatgagaaaatagcaatcattttatttgatatagataattttaaaacagttaatgacacatatggtcatgattttggcgatttagcattaatacaacttgcagagcttatgaaatctaaagtggagcagcaacatgtatttgcaagatggggaggagaagaattcattatattagtgacaaatacagtagaaaaggaagcatttcaagttgcggagtcattacgattctttattgaaacaaagcaatttactggaatttcgaagttaacagctagctttggagttgcgttatatgaacaaggaactacaagagaagaattaatgcaacgagcggacattgcattatatgaagcgaaaaaaaatggaaagaatcaagtatgtgtgtatagaaaagaaaaaatgtaatttttcgcaacaaattgttgcgatttttttttattgtttgataatagaataggggggataatttttagcgaaggaattatggaggatcaatatgataaaaaaagtaatggtgatggcttcactgtctgctatagttggcggcggagtatactattttcttgttagccccaatataaaggaaaacactgtattaacaactaaagtgaatcctactattgaatcggaagtacaagggaatatagaagaaaaagaagagcaacaaattgattatgctagcatatctcaaaaattagatcaatatttagtcggaaagcaatttaatggaacagttttggtaacagataaagagcatgttatattgaataaaggatatgggtatgctgatgttcaaaataaaatagaaaatacgcctcaaacaaaatatcgtatcggttctattacgaaaacagttgttgccacatctattttacagttgcaagaacaaggtaaattgaatattcaagataatgtaaataaatatattccttcatttccggagaataaaaatattacgctatatcatttattaacgcatacctctggtttacctgaacatgcgaaaggaaatgtgaatgctgcttcccgtttacagttaattaattggattggacgtcaaaatttagaatttcctgcaggaacaggttggagatatacagattataattatatggttcttgcttatataatagaacatatctccaaaaaacctttaggagattacataaaagaaaacatatttataaaagcagatatgcatgaatccggtatgggaaatatggtacctggagataaaaattttgcaaagggttatgtgaaaaaagataaagagcttgtaccagcgcagaagttaggcatggattggctatatggttgtggtgagatgtatacgacagttggagatatgaagaaattagacgaagcaattataaatggaaaacttctttctgaacaaagtatacaagcaatgttttcaccttcagcagaacggaaatatgcatttagtttttatatatatccagattattttcataatcatggtgtattatctggttggaacactttcaataattttaataaagaaaaaggaacttttgttatgttattttcaaatgtgaaaaatagtatggatgatgactttaataaagagttccgaaagatggtaaatgatttattagaacaaaggggatgagaaaatggaacataaaactttatcaataggtttcattggtattggcgtaatgggaaaaagtatggtttatcacttaatgcaagatggtcataaagtatatgtatataatagaacgaaagcaaaaacagattctttagtgcaagatggtgcaaattggtgtaatacgccaaaagagttagtgaagcaagttgatattgtaatgacaatggttggatatccacatgatgtagaagaagtgtattttggtatagaaggaattatagaacatgcaaaagaaggtacgatagcaattgactttacgacatctacacctactttagcaaaacggattaatgaagttgcaaaaagcaaaaatatatatactttagatgcacctgtctcaggaggagatgttggcgcgaaagaagcaaaactcgcaattatggtaggtggagagaaagaaatatatgatagatgcttacctttacttgaaaagttaggaacaaacattcaattacaaggaccagctgggagtggacaacatacaaaaatgtgcaatcaaattgccattgcttccaatatgattggagtatgtgaagctgttgcttacgcgaagaaggctggactgaatccagataaagtgttagagagtatttcaacaggggcagcaggtagctggtcattaagtaatttagctcctcgaatgttaaaaggagactttgagccaggattttatgtaaagcattttatgaaagatatgaaaattgctttagaggaagcagaaaaattacaattaacagtcccaggcttaagtttggcgaaagaattgtatgaagagttaattaaggatggcgaagaaaatagtggaacacaagtattatataaaaaatatataagggggtaaacgaggtggaccttcaaaagtttgatgagatgattgatactgtacagcgagctacttgtatgcaaattaatgaaagacaaaaagaagcttttaaacaaaaatatgattttgaaccagaatttgaatatggaagagatgagaaggggcattatgtaattcgaacctcaaaaaagatgttagaagaaatggagttttatttagcattgaaatatgatcgtgatggagtggatctttatatgcaagctgagattgacggcatattttatgtatctattagctatggtgaagatgccctacatctacaagaattgtttcaatttctagaagaaaataaataaaagtcctcaaatgaggacttttatttatttagtcatctttaatttttataattataagttagaagcccggcggcatcgttcaaccgggaacgggataatttgtgcgatgtgattagggccaaattgttttgtacgagcatggcgtattatataaaaagcacacagaattgaaacaggaatagcgccgaataaaccaaataataaagcgcttacacaagatgcgacaaatcctaaaacaccaatttctaactcttccataatagctcctaaaataacaggaaatgctccacatgtaactccaagtataagtgcgataagtaagctcatgattatccccctctgtttgcgatattattttccttcttagttaattgtagtatatcacatataaaacagaattttcagaaaaaatttaataaatgttcaaaaaatgttcgaaaaatgcacttgaaaaatcaagatgttaaatttgtgatgaaatagtactttcaagtaaataaaaaatcaggcttatttcaaaatgaaataagcctgttccataggaggatgtatatatgtagagtgaataaaagtttggaaaagggggtccaagtccttttattcaactaactaccttaatagattggaacccagccttcagttgtcacaaaaatacgaatagctacaacttggcgatcatcttgcaaggtaaaataatgtcttgcattttcaggaacagatattaaatcgcctggctcaagttcaacatcaaagaatttcccatctttaccttcaatagcgaaaatgccatgaccactgacgataaagcgaacttcgtcatctgtatgatggtgttccttttggaaattaattaataattcgtcaaggttaggggtgctatttgaaagtgaaattacatcatgtgctttataaccacggcgtgctgaaacatcagcgatttcttttgaaaacacagctaatatttcagctttgttttcatctgttaacgaataattttcatttaaatgagtaggaagtttagaaatattccatttctcatataaaacgccttcctcttgtagaaatttagatacttccacttcattttcaatacgagtatttacttcatgaatacgaatttgcgccattagaaacgcctccttgaattgataatagttttatatgaaattggaataaaaactcataagcttctaatctcttctttgcatcaaagctatctcggccccatacagtaataccgtggttacggattaatactgcacccgaatctccttgtatatgctttcggaagttttctccaagcgttgggatatgggcatggttttcaataataggaatttgaattgttgcaccttcttcccaaatatcgagtgctttaataatttcttgattttgaagggtgactgcatcactatataaatttgtgatgacattattatcagttgtatgaacatgaagtacgcacccggcattcgtattgttataaatgtgtgtatgcaatattgtttctgctgaagggcgtaattcagtctctaaaacgggaactcctacatgatctactaatagaaaatcatctggagtggtttttgttttatctttaccgcttgctgtaataagaaaagtaagtggttcatggctaacctttatagaaatattaccacttgttgctggaaaccaatttcgtgttgttaactctttttttaactcgcttaagtcataccattgacgaaaaagttgtttcatgccttcacctccaacaaaagttttaattcagcttgcacatcttgaaatgtttcaaacggtgtataagcaatatgattttcttcacactttgtaataagaaaatcgcgagcgaatactttatcagcttgtttcgcggcttgtaaatcagtaatagaatctccaattacaatatgaaagtcatttgtatcacttaatttacggattaatgatgatttacataatccgcaatgattttgacaatgatcatcacaagaatgaggccatttaactgtaataaactctgctgaaaagtctgtttcattacaataaatttgctcttttggaatgattccttgtaagagtggatagacgaagaaatccattccacctgatatcacgtaaaaagaaatgttattttcctttacgaattgtataaactcatgaaaaccactacggatttcagcagtttctattaaaaattgaataatatcatcgtgcagattagtaggtattaattgaaataatcgagaaacaccttcttgaatggatagttcttgtgataaaattttattctttacttcttcggcttctggtggtgcgaatttttccataatggacataatgttatcattatttgtaatcgtgccatcgaaatcacaaaatacttgaatactcataatttcacctcataagagggatttccccatatttgtagtgcactatgcaaatttatgtcgtctacttcatggagtggtttattttgcaaagtagcatcaattgcagtacggaaagctttaccgccgccttgcgctccatttggatgtccgtgtatcccgccgccagcattaataacaacatctttaccgaaatctcgtacaataaagggaacgaaaccaggatgaataccagcagacggaacagaaaagctcttcttgaaaaatgcatcgtcttcagttaaatattttgagatagcaagagcctcctctttttctagcgcaacacttccgtatggagatgggaataatgaaaagtcagccccagcataacgtagtagctttccaagtaataatggtgatgaaactccatataacttggatgctgaataagcaccacttacagcaggatgtgccataataggaactgggatttcatcatcttctgcaagtgattgtagtacatctagtccgtaagcaaatacgttaaataatagaatatcagctccagcttgcactgcacgtttagcattttcttttaaatcaaaagttcgtcctgttaaatttaaggcatataacgttttatgaccgtatgtttcgtagacagattgtaaaacttcttttccagatacaatgcgtttcgtaagtggtgttaatgcattttcaaataatatttcatcatcttttactatatctacaccaccaattgcttgatcgcgtaattgtgtttttaaatacccaatgtttcgtccaatcattcctttaaaaatactcattaaaaggggacgatcatgcacttgtaaaagatttcgaataccatctatcccgaattttggaccaggaaaatgtttttttaactcgtctgaaaaagttaagtcaattagttttacttcgccatcaagtgatagctttccaaatgtagtcgttaaaatcgctggtaaatctggactgaagtttaatagcggatattcgattttaataattccgcgttttacttttttacgtaaatacgaattggtatattcatgttcagctaattcctcaacatgaatgacgttgcctttatgctgctttaattgttcttgcaataagtgtggcaaatgagtccaagagccaattgttaaaccgagtgcaatttgctcagcttttttttctaagttatgtgaatcatcatggattaaatacgtcgctataattccgctcattgttataacctcctagttaaataaaaaaacctctcagctaaggagaggtttttttacaaccagctccttatctgtcagcgtaatgctgcgagaattagcaccgtgtctacaattgtagatcggttgccgggtttcgtcgggctcgtccctccacctgctcttgataagaagtatttagaaatgtttaaatttttaagataactgaattttgtcagatatttttcgtgttgtcaattactttttgaaaaaatttaatttatcaattcgattaatggcttcccgtaatctatcttctgcatgcaagagaccaacacggacatacccttccccatgcttaccaaatccaacaccaggagcaactgcgacatgtgctttttctagtaaaatatcagaaaattgctcagaggtatatccttttggaacgggaagccatgcaaagaatgatccttttggaatgtctacattccaaccaattgagtgacaggctgaaataagagcgtttcttcgagattcgtaactatttacaaggtctattacgcaagactgtgaacttaatagcgcttctcgagcagcatcttgaactgcaccgaatatactaacatacatatgatcttgtaataggttaattgtttcaatcacactttcattccctacagcaaaagcgatgcgccagccagccatattgaaagtttttgataatgtgtaaatttcaattcctatatctttcgcaccatctgcttgcaagaaactaacaggtttttgaccatcaaatccgatagcgccataagcaaaatcgtgaacaactaatatattatgtttattagcaaagtgaatggttgcatcaaaaaaatcttttgatgcagtagcaccggtaggattatttggatagtttaaaaacattaattttgcacgctctgcaatagagtcatcaatgtttgtataatctggtaaaaagttattttctgcaataagcggcattgtttcaaagtgtgcttttgctaaagcaaccccggataaataatctggataacctggatccggaacgagaatcgtatcaccaggatttgtaaaacaaatcggtaattctactagtccagccttcccgccaaacaaaatagcaacttcagtttttgggtttaattcgacgccgtattcacgtttatagaatgtagccacggcttcctttaagctttcatgtccgcgaaatggcggatatttatgatgaatggtcttttcggcagcatcttgtaaagcttttacgatatgctgcggtgttggttgatctggattaccttgacctagattaataacatcgtgaccagctgcaacgactttgttaacttttgcaacaagtgaagcgaaaaattgtgttggcaatgatgttactatctcagaaggttgaaataatttcatactttccacctcttttgaaagttgttacaattctagtgacaaatgatataatctttccagtattttgtaaagaaaaaaataagaatggggctgaaaaaatgaaagtcgcatgtattcaaatggatattgtttttggagatgtagaaaaaaatattgagaatgctaaaaataaaataagcgaagctatgaaggaaaggccagatgttatcgtcttaccagaactatggacaacaggatatgatttaacgagactttctgaaattgcagatagggatggagtggaaacgaaagaaaagttaatagaatgggcgaagcaatatgatatacatattgttggtggttctatagcaaagcaaacagagcaaggcgttacaaatacgatgtatgttgtaaataatgaaggacagctagtcaacgaatatagtaaagtacatttatttcagcttatggatgaacataaatatttaatagccggtaatggtacgggcgaatttaagctagatgatgtcgaatgcgctggaacaatttgttatgatattcgttttccagagtggatgcgtgtccatactgctaaaggggcaaaagtattatttgttgtagcagaatggccattagttcgtttagcacattggcgtttgctattgcaagcaagagcagttgaaaatcagtgttatgttgttgcgtgtaatagagcaggaaaggatccaaataatgtatttgcgggtcattctttaattgtggacccttggggtgaagttgtagtagaggcgaatgaagaggaatcaattttatttggagagcttgaattcgagaaaattaaagaagtacgtaaaggaattccggtttttgcggatcgccgtccagaattatacaaataaaatgttgacaagtgatttttattcttggtatagtcttcaacataaagttaaaaattcaaaaaattatacaactcttatcaagagcaggtggagggatttggcccgatgaagcccagcaaccgaccgtaataccattgtgaaatggggcgtttattacgccaaaaggcacggtgctaattccagcagaaagtaaaaccttctggcagataagaggggagaagataaacttcaaacctctttcttagtggaaagaggtttttctatgttagaaaaacctctgaatttaaaaagggggagaagacgatgggatattattcattaacagaaataacagctgtacaatatgcgaaagatcatggctattttgaagcgaaggcaaatgtcgtttgtcatgaaattggagacggaaacttaaattacgtgttcaaattagatgatggagagaaatcaattataataaaacaagcactgccttatgcgaaagtagttggtgaaagctggccattgtctataaaaagagcaacgattgaaagcaaggcattacaaatttttgcgcagtatgtaccggattatgttccagtagtgtacagtcatgatgaagagttagcgataacggtaatagaagacttatcaagactaacaattacaagaaaaggattaatagacggagaagaatatccgcttttatcccagcatatcggccgttttctagcacatgttttattttatacttcagattttggtttacagtcagaagagaagagggtactagaaggtacctttgtaaatccggacctttgtaaaattacagaggatttagtgtttacagatccgtttggacattatgatacaaatgattatgagccagatttacagctcgtggttgatgaactttggagtgataaaactttaaaactaaaagtagcacaatataaatataagttcttaacaagaaaagaaactcttattcatggtgatttacatactggtagtattttttcgtcaccttctgaaacgaaagtgattgatccagaatttgcgacatatggcccatttggatttgacataggtcaatttattgcaaatctattattaaatgctttatctagagaagaagaaaaaagaagtgtactatttttccatatagaaaagacgtggagttattttgtagaaacttttacaaagttatggattggagaaggtgtagaagcatatacgaaagaaaaacaatggttaccaattattttgcaaaatatctttactgatgcagttggatttgccggatgtgaactgattcgtagaacaattggtttagctcatgtagcagatttagatgaaatagaaaataaagaaacaagaattcaagctaagaaacaagcgctatccttaggtaaagaactaataaaatatgaatctaaaagtgctgatattcaactgtttcgaatattatttcaacagacagtttcagggggcgtaaaagcgtgagtacaattgttactgttccgagatctgtaagctggaaaggtgatgcaattgcggtattaaatcaaacgaaattgccgcatagcacagaatacaaaacattgacgactattgaagaggtttggaaaagcatcgtaatgttagaagtacgaggagcgcctgcaattggaattgtagctgcatttggcttggcgcttgcatcaaaaaaatataacactgtacatattgaagaatttcaaaagaagtttaatagagattgtaattatttaggaacgtcacgcccgacagcagtaaatttattttgggcaattgatcgtatgagagaatctattcgagagattactacaataaaagaagcacaaaaaacattagaagaagaagcgcttcgcattcagcaggaagatgaagaggtgtgccgaaatattggggaatatgcgttaacatgttttaaagatggcgataatattttaacaatctgtaacgctggaagtatcgcaactgccagatatggaactgcattagctcccttttatattggaaaagagaaaggtgtgcgtttacatgcatatgcgtgtgaaacgagaccagttttacaaggtggtcgcttaacgacctgggaattgaagcaagcaaatattgatgtgaccccatgcccatcaacttaaggatagaaactctacggttttccattaattgaaatgaagcaaagcgtgaattaggctgggaggcaacacgcggattagaagaaatgtgtgctgactcttggaaatggcaatcaaataataaaaatggctatttagaagtttaatgatgaatataaaaaatgacctttgcataaaagcaagaggtcattttttatattcattttctactaagtttattagcgaacctagaaaagaacgttcgctgttttaaatgatatgattttacaatatcttatgctagaaggtagtagaatgagatagagtaatgtattattttattaattttttatgggaattgaaagcgtattattgaaatgtattccaacacttgtatcattgctagagtccgtttataatcaaggaatcctagttcatgttttgataggagtatttattattgaaagcgttttaagttcactccttttttgaggtaggaggtctgacttatttaggtgaaaaattatgtatgtagttttaaatgggaagaaaaataatataagtatcattttatagtgtggggaggttaaaagtgtgaaaggtaaagattttcacacgaatatatatgggttatgtaggattattactttcaggggcagctttatttttaaatagtcttgttatattagggaaagcagagatgaaaagtgcgggtgtttttaatttatttgtgggtgcactacaaattattattccgttttatttgattatgatttctgaccaaagcaattggacagtgtattcatatgcggctactttcttatttggattaacttatttatatgtaggtgttacttttataaaaggaatggatagtagtggtctaggatggttttgtatttgggtagcaattatagccttattctatatggttgtttcatttgttcaattccatgatgttgttaatgcgttaacgtggtttatgtgggcattactttggtatttattctttgtattaaatacacaaaagaagaacattaatcaatatcttggaaggattgccttcgtacaatcatgggtaacattgactttaccttcactcttttattttatgggagtgtggggagagggattcgtatatgaattatgggtttatgtatctgtaatttctattttatacttctgttattgtatttataaatatcgagtacgttaatatattatctgtataaaggcatggaatcgttaaacgaattccatgctttttatatgttagcacttataatagagaggtagtattttacaatttgctaaagtggggatgatgaagttgaaaaaagtattggtgctagggggaacaagattttttggtaaacatttagtagaagcacttttgcaagaggggcacgatgtaacgattgcgacgagaggaattacggaagattcttttggcagtagagtaaaaagacttattgtagatagggaagatgaaaaacaactagcagagcgtctaggagataaaagttatgatattgtatacgataatttatgctatagctcgaatgcagcgaaggtaatatgtgaagtgttacgagggaaaacgaagaaatatgttatgacatcttcaatggccgtctatgaacctgccctaagcttatcagaagaagactttaatccgtacgagtatgcaatcgcgtatggagataggaatgacttcaattatggtgaaggaaagagattagctgaagccgttgtatttcaacatgcaacattcccagtcgttgcagtgcgttttccagttgttattggagaaaatgattatacgaaaaggttacaattttacgttgaatgtattgtgaaccaaaaacctatcgttgtggatcatgtagatggaactttgtcatttatacatgaaaaagaggcaggagagtttctagcttggtgcggaatggcaaatgtgagaggaccaattaacgcctgtagtaacggagcagtttctatggaagaaattattcatttcatagaagagaagacaggaataaaagcactcattcagaaagctgggggaaatatagctccttataatgaggtaactaactgtacgttacataatggaaaggctcgtgaattcggatttttgttccgagagctgaaactagaaataaaaaatattttaaaacattatataaatacaatgaagtaatcataaatcccccggtggcaatccgggggattctggaggatttcgacaatactgattttacattaccaaatttaccttatacgtacgactaatgtttttgtgattgaattgcttgtaaatacttctcgtttacttggtcccagtttactgtatgccaccagttggtaacaaactctgggcgcctattttgatactttaaataataagcatgttcccatacatcaattacgagtaaggggattttcccttcttgcaaaggcgtatcttgatttggtgtactcataacagagagttcctcaccgtcaagaacaagccatccatagccacttccaaaacgactaatagctgctttggaaagttgatcttttaagttgtcaaaggtattgaaataataatcaattacttttgcaacgtctccattaggctcaccgccacctcgtgggctcatcacttcccaaaaaagactatgacaatagtgaccaccgccgttatttcgtacagctgtaacaatttccttcggtaaagcatctaaattacatagcaattcttctaaagatttattatgtaattcagtataattttctaaagtagcatttaaattgtttacgtatgtcgcatggtgctttccatgatgaatggcaagtgtattgctatcaatatgtggctctagttcatcatagtcatatgaaagctttggcaattgaaatgaagacataacattccctcctttcgacttaaaaagttggtctaggtaaaaatactttacctgagtcaaaaatacacccattttccatataagtcaatagtaattccattaattttctgaaaaatattacaataaaagtaacactctcactttcatttgtgactcctatcctttttgcttatactgtaaagtagcagggttttgttgaaatagaaggagattgtttatgagtaaaacgaaacaattaatagaggaagcaagtaattttattacgatttgttataaggagcttcataaagaacaattgatagcagaacgtataaaagaaattcaaattgagatagagaagacagggacatatgagcatacatttgaagaacttgttcatggttcacgaatggcatggcgtaacagtaatagatgtattggaagactattttggagtaagatgcacatattagatgcgcgcgaagtaaatgatgaagagggtgtatataatgcattaattcatcatattaaatatgcaacgaacgacggaaaagttaaaccaaccattacgatttttaagcaatatcaaggtgaagaaaataatataagaatttataatcaccaattgattcgatatgcaggatataaaacagaaacgggagtgattggtgattctcattccgctacatttacggacttttgtcaggagcttggttggcaaggagagggtacgaattacgatgtattgccacttgtgttttctatagatggaaaagcgcctatatataaagaaattccgagagaagaagtaaaagaagtgccaattgaacacccagaataccctatttcatcacttggagtaaaatggtatggtgttccaatgatttcagatatgcgtttagaaattggcggtatttcttatacagccgctccgttcaatggatggtatatgggaacagaaattggggcgcgcaacttagcagatcatgatcgttataatttacttccggctgttgcggagatgatggatttagatacatcgagaaacggtaccttatggaaagataaggcgctaattgagttgaatattgccgtactacactcctttaaaaaacaaggagttagtattgttgatcaccatactgctgcacaacaatttcagcaatttgagaagcaagaagctgcttgtggtcgtgttgtaacaggtaattgggtatggcttattccaccattatctccagctaccacccacatttatcataaaccgtatccgaatgaaattttgaagccaaatttctttcataaatgatatttagtgtagtttttttctgtgaaatataatttttttaattactgttatgtagcaaatggaagcctttactctcggttatttttggaagaggctttttgaaccaaggagttccttatgttataatcaaatttctgtttcgaagaccttatagaaatataaggtcttttgttttgcttttttatgtaagaggaagagattctttctttttaataagggatttggcatatttttagggacaacataagtatgtgggaagtcgataaaatgttatgcatatataattattgtgttttggttttaaacaataaaacataataaagttgtttttttagattgctgaggaaggaggaagtgtaaatgaggatgaagagtcgaaaaactgattggcctgtatttattattagtggtggttcacttttattatttgtaattgcagtttttttgaacaaggattatgtagagagtgcgattaataaaagtttcgctttttcaattaaatatttcggtgccttctggcaagttttattattaggtacatttattgttgcgatgtgtatggcgttctccaaatatgggagagttaagcttggaggattagaaaaacctgagattagtacggcaaaatggcttgctattattatgtctacattacttgccggaggtggcgttttttgggcagcagcagagccaatgtatcatttgatgacggtgccaccaatacatgatggtatatctgctggaacgaaagaagcagttatgcctgctttagcacaaagttatatgcattggggatttttagcatggacgattttaggtacaattagtgcggtagttatgatgtatggacattatcataaagatatgccgctaaaacctcgaacgcttttatatcctatttttggggaaaaattaagaaagagcctgcttggaacgataattgatgcagctgcaattattgcagtagctgcaggtacaattggcccaattggatttttaggtttacaagcaagttatggattacaagaattatttggaatttctaatgtgtttactactcaattagcaattattgtttgtgtggtggccgtgtctaccatatcggcagtaacaggtattgataaagggattcaaattataagtaatttaaatgttagattggcaattgtattaatggcattcatattactatttgggccaggtggatttattattgattcgtttgtttcttcgtttggattttatgtaaatgagtttataccgatgagcacataccgtggtgatacaagttggttaggatcttggacaatctttttctggggatggtttattggatacggaccaatgatggcaattttagtgagtcgaatttcaagagggagaacgattcgagaaatcatcgttgcaattggaattatcgcacctattattacaacgttttggtttactatattaggtggatcaggcgtgttttatgagttgatgaatcctgggtctatctcggacgcattaagtgaatctggtatgccggcagctatgattgcaattacaggacaattgccactttctaatattattggaccagcatttcttttattaacaattttatttgtagtgacaacaggggattcaatggcgtattccatttcaatggcagtgactggagacggagatcctagaattagtttgcgaattttttggtcgcttattatgggcgcagttgcagcaattcttttatatatgggtgaaggaagtattaatgcgctacaatcgtttatcgtggtgacggcagttccggtatcaattttgttattcccaatgctatggttagcgcctaaagttgcgggagaattagcattaaaacaaggtattgtaaaagaagaagataaaactgcattcttatttcagaaggctagtaaatcaaaataaataaaaacgtaaaagaggaagcatcttaaataagatgcttcctcttttacgtttaatctaatacttttccctttgtttctggtacacatagtagcattgtaattaacccgattgggtagatgataaaaatcaaggacaatgctccaagtaggttgccacctgtagcgagtaagccaataataacaggcccaaatccagctaacccacgtcctgtaccgaaaataaagttttcagcggtagagcgagcttcagcaggatagttttcagctaaaattgctccaaatcctcccatcattccatttgcaaagaatccaagcaatgcacttccccataataataatgttgaatctgtgaataagaagaagtaaatgagacagtatgctgtaccgccaatataatagattgcaaaagttttacggcgaccaattttatcagctagaataccaaagattgcaattccaattagcataccgatggtagaaatgaacatccagccacttgcttttgctaatgtatagttatatttatttgctaaaatagtgggcatccatgtgaagattccgtaatatccgaagttttggataaacgacataataataagaccaattgttgtaattgttacttttttattggcaaataactttcgaagtgggaatttttttatatgttttagttgttctgcttcagtagttgttaatttacctgtagcttctttttgcaacagttcctttttgtagcgttgtttttgctcccatattttcggttcacttaaacttttacggacatagacagctagtaaagctggaattaatccaaataagaaaacggctctccatccaaagtgtgggacaataaatgctggaaggagtgaagcaatcagtacaccaaattgccatccaagtgcaacaacagatgtcgctttagcgcgcatttctttagaccaggtttctgttacgatggccattccgattccgaattcaccaccaactcccattccaactaaaaagcgcagaattaataattgccagtagtctgttgcgaaataaatgagtgcggttgctagtgaaaacagtaagattgtgaaggccattgtacgaatacggccaaataaatcagcaataaatccaaataaataagaaccaattaacattcctattgtggtagctaaagttaagtttccaccttcaacaggacttaagtgaaactcttttaaaatatagacaagtacgaaagataatagcaacatatctaaaccttctgctgcatatcctagcgcagaaccaaataatgttttatatcttttcgcttttgtctcctctgttgtttgttgtacatcagtagtgacgttcattattactcctccttattttctacagtcgctatggaagaataacaaaaggccttctcacctgatatgatgagaaggccaaaaaagcatacgtatccccaaaaaagaacatacgtatattgtattccgacttccttctcaacctcacggggttgggttaaaggactgtattatattactttatttttagcactcttctattgtattgtcaaataaagaggaagttattatgtgtaaaatatttcaaaaaacatttcgttcttcttgacgccgacttcattattttcccataataaaactaactaaataaaaaggaatgaatcaaagatgctaaatttagtactcatgatgatcgaacgagtcggacttatagttattttaggatttttactctctcatattaaaactttcagacgcctccttcataaacaggatggctatgtagataagctgaagcttatttgtattttttcggtatttacaattgtaagcaattacactgggattgaaatagcaggaaatacgattatgaatgaaaactggttacaaggtgtttcttcgtcaagtacaattgcgaatacgcgtattatgggtgtcggtattagcggcttacttggtggccctatcgtaggggttggagtaggatttattgctggtattcatcgttatatgcttggtggtacgacagcgctaagctgcgcaatctcttctattttagctgggattataactggttatattggatatattttcaaaaaatataatcgtacaattactcctaagttttcagcagttttaagtgtttttatcgtatctttagaaatgctaatgattttattaattatagaggatggaattagcgttgtgaaaacaatagcgataccaatgattcttgtaaatagttttggaagttttattttactttctatgatacaagctattttgcgtcaggaggagaatgcaaaggcacttcagacccataaagtattacgtattgcagataaaacgttaccgtatttccgccaaggcttaacagaagaatcatgtaagcatgtggcacaaattattcaccgttttacaggaacagatgcggtatccttaacagatacagagaaaatattagctcatgttggattagcatcagatcaccatattccttcacatagtttaataaccggtttgtcgaaagaagtgttaaacacagggaaaataatgaaagcgaaatcacgtgaggttattaattgtcaacatgaaggctgccctttgcaagcggcgattgtaattccactaacttcgcatggaaatacgatagggacattaaaactctatttcaaaaatcctaaccagttaagtcgtgtggaagaggaattagcagaagggttagcaaaaatattctccacgcagttagagttaggagaagctgagttgcaaagtaaattacttcaagatgcggagataaaagcattacaagcgcaaattaacccacactttttatttaatgcgattaatacagtatcagctctatgccgaacagatgtagaaaaagcaaggaagttattattacagcttagcgtatatttccgttgtaatttgcaaggggcacgtcagttattgattccactagaacaagaattaaaccatgtacaggcatacttatcactagaacaagcaaggttcccaaataagtatgaggtaaagatgtatattgaagatgagctaaagacaactttagtaccaccatttgttcttcaactattggttgaaaatgcattgcgacatgcttttccgaagaagcaaccagtatgcgaagtggaagtgcatgtttttgaaaaagagggtatggttcactttgaagtaaaagataatggacagggaattgaggaagaacgtttagaacaattaggaaagatggtagtttcgtcaaagaaagggactggaacagctttatataatattaatgaacgtcttattgggttatttgggaaagaaacgatgcttcatattgaaagtgaattaaataaagggacggagattacctttattattccaaaaaaagtaggggaggaagagccgggtgttaaaagtattagtagttgacgatgaaatgttagcacgtgatgaactaaagtatttattagagagaacgaaagaagttgagataattggtgaggctgattgtgtggaagacgcattagaagaactaatgcaaagtagaccagatattgtgtttttagatattcaattatccgatgataacggatttgaaatcgcgaatatattaaagaagatgaaaaatccacctgcaattgtatttgctactgcctatgatcaatatgcgctgcaagcatttgaagtagatgcgttagactacattttaaaaccatttgatgaagagcgtattgtgcagacattaaagaagtataaaaaacaaaaacaagcgcaaatagaaacgaagcacgaaataaaggggacagatgtaacagcagagatgcataaattagcattaccaattgaagaatcaatcgtacttgtgaatattgaagatattatatatgtagggcttgtagatgggaaagtaacagtaaaaacaacgagggaaacgtatgtaacacatgatacacttgtaattttagagaagaagttaccacaagcaagcttcatgcgcgtacaccgtagctttattgcgaatattaatcatattactgaaattcagccatggtttaattctacttataatttaatcatgaaagaaggatcgaaagtacctgttagccgtacatatgcaaaagaactcaagaagctgcttcgtatttaagaagcagcttttgtatttcatccttttatatttgtaactgattctgtatatttgacgttctgttatgtaaacgcttacttatacgtttgtatcctatacaataaaggtaccaaatcgaaagaggtggccaaaatgagtacgaaaaaagtatatagtttcttatcacaagcattcatattctcagctattatgttaatttctaatattattgcaacacatttaccaattccaatgccttcatcggtaatcgggttagttattttatttagtctattatgtttaaaagttattaaattggagcaagttgaatcactcggaacagctttaacaggtattattggattcttattcgtcccatcaggtatttcagttattaattctcttggtgtaatggggcaatactttgtacaaattttaactgtaattgttgtagcaacagttattttacttgctgtaacagggttatttgcacaatttattttaggaaaagatgaaaaagaaacagaagatacaaaagaattgaaagtagtaaataaaggacgcaagcacggaaaggttgcgtaaccattgcatttatatattgttaggaggtaatgaacatggcaagcacaatgactccatatttcggaatcgtcgtttcattaatcgcatacggaatcggaacattattattcaagcattcaaaagggttcttcctatttacaccattattcgtagcgatggtattagggattgtctttctaaaggtaggtaactttacttttgaagaatataatactggcggaaaaatgattagtttcttcttagagccagcaacaattgcatttgctatcccactctataaacaagttgataagttgaaaaaatattggtggcaaattttatcagctatcgtggttggatctatttgctcagtaattgtcgtgttcattgttgcaaaagcaatcggtttagatacagcagtaatgaattcaatgctaccacaagcagcaacaacagcaattgcgttaccaatttcagaaagtattggtggtattccagcaattacatcgtttgcagttattttcaacgcagttatcgtatacgcattaggagcattattcttaaaaacatttagagtgaaacatccgattgcaaaaggtttagcacttggaacagcgggtcatgcattaggagttgcggtaggaattgaaatgggtgaggtagaggcagcgatggcaagtattgctgtaacggtagttggagttgtaacagtagttgtcatcccaatgttcataccattcattggatagtaaaacttacttaaaaaataagaaaagcaagctatttgtaggacagatttctactgatagcttgctttttatgttacagtagtggtaagacctatttaaaaaaatgtaagtttccttaaatcttcattaatactatgtagaatacgttttgaattaggtcattgtattgtaaaataagaagtaagctactatatacctgttaaggtaggcatataatgagtttataaaaatcttaatatgaataataattaaaagtagaaaaaagagagaaatctacttattaacgttttagtttataggacaggagagagtattcgtcgattatgcaaataaaaaacctgtttcaaagtaaaggattccagaggttactcgtattagtaatacttgctctcgtgttatacgggctgcaaagtatgttgaatttaatattaattacgtttattctcacgtatttaatggatcgattccaaaagtttatttcccgcaaattagatcatttcatgcctattaatcgaaaaattattatagcgtttctatatgtaatgttaattggtggaattgccattacgctatttaaatatttaccagtattaacgatacaaatttcacaattgatttaccaattcaatgtatttttaagaaacccaccagatagtgaactaattaagtatgcagttaatgctgtcaatcatatggagctttctaaatatgtaggacaaggcgtagacattttgtataaatcaattacgaatgttggtaaatttggccttcaagttttactttctttaattttgagtttgtttttcttattagaaaaatctcgtattgtcggttttactgcaaagtttaaagaaagcaggcttgcaattttctatactgaaattgagtacttcggaaagaaatttgcacgttcatttggaaaggtaatcgaagcgcaatttttaattgctgttgttaactgtgttctttcagttatcgcattatggatattaggatttccgcaattattaggtttagcattaatgattttcttgcttggattaattccagtagccggggttatcatttctttattcccactttgtatgattgcttataatattggcggtattatgtacgttgtttatattttgattatcgtaacagtgattcatgcgcttgaaagttacgtattaaatccgaagtttatgtcgcaaaaaacaaatttaccgattttctatacttttatggtattaattttctcagagcacttcttaggtgtatggggactgattatcggtattccaatcttcattttcttactagatgttttagacgtgacaagtgatgaaatggagaaggatgttggaaaaaataaagtgaagtagagaaaaagcatcgatgttcgatgctttttcttttataacattatgtttcttatgccatactgtaaggagaatatagaataggggtgaagtaatggctgtaaatgaaaaggtagaattggctacatttgctggagggtgcttctggtgtatggtttcgccatttgaagagatggaagggattataaaggttgtttctggctatacaggtggtcataaagagaatccaacgtataaagaagtatgttctgaaacgacgggacattatgaggcagtacaaattacatttgatgcaaataaaatgccgtatgaggagttattaaatatatattggagacaaattgatccgaccgatattggggggcaattccacgaccgcgggcagtcttatgaaacggtgattttttatcataatgaagaacaacataaaaaagctgaggcctcaaaagaagggcttgagcagagtggacgcttttcaaaaccaattgcgacaaaaatactaccagcagctacattttatccagctgaagaatatcaccaaggatatcataagaaaaacacattccgctatgagttatatcgtaaaggctcaggacgagatgcttttattaagcaacattggccaaaggatactgctcatttaaaagaaaaactcaatgagatgcagttttatgtaacgcaggaaaatggtacagaaccaccatttcgaaatgagtattggaaccataaagaggaaggtctttatgtagacatcgtttcaggtgagccgctatttacttctctagacaaatttgatagtggatgtggatggcctagttttacaaaaccagttatgtcagcaagtgtgaaagaaaagatggatgtgagtcataatatgacacgtacagaagtgaggagtaaagaaggagactcacatcttgggcacgtatttccagacggtccaggaccaaatggccttcgttactgtattaattccgcagctcttcgatttattccaaaagaggaattagagaaagaaggctatggcgatttcctaatcttgtttggaaataaaaaataacctcgcagttagcgaggttattttttattattttgtttttttctttttaaatttgcttaatatttcataaacgattggaacaataagaagtgttaataacgttgaacttgttaatccaccaattaccgttacaccaagccctttagaaattaagccactaccttcaaatcctaatgcaagcgggataagagcaccgattgttgcaattgcagtcattaaaattggacgaaggcgtgttgcaccagcttctaataaagcttcacgtgttgatagtccttcattttctttatgaataacgcggtcgataagcacgattgcgtttgttacaacgataccgattaacataagcgcaccaatcattgcagatacacttaatgtttcaccagagattaataaggcaacaagagccccaataattgtaaatggtagcgagaataaaattgcgaatggtgcaagggcaccaccaaatgtaacgacaagaacgaagtatacaatggcaatcgcagctaacatcgctaggccaagttgcttaaatgattcttgaatatctttagtaacaccgcccatagaaacatctacaccagaaggaagatccattttatctacttctttttgtactgcagcagatgcttttgaaacgtcatcagatgttaatttggcactaacctctgcataaacacgtccatctcggtgtgttactgtattcgatgtttcaccttcttttacagtcataacatctttcacagctacttcattaccaagtggtgttgtaattttgcgatttgttaagtcatcgattgtttcataattttgtttttcagcttctacatatacattgatatctttaccgtcttttttaattgttgtcagaacagggcgatcatgttgattagaaagtcccattccaatttgagcagccgttaagcccattttactcagcttttcttgatctgcgactaaagtgtactctgcatatgtttttgcaatactagaatctatatcttttaagtctttatttttcttcatgatattttgaatatcttttacgacaggcttaatgtcttctgagctatctccgtaaacgtatagtttaatttcgttactaccgccacttgctccgaagtcttggtttttccattcgcctttgccagacatcttctgtaaatctttaacgacttgttctttctctttttcaaagtttttcgtgtcgttatcatattgcacgaagaacattgcttggtttgattgaccaggactcattggattctctccacctaatgagaactgaattgttttgacgtttttattatcttggaagtgcttctcagcttttgttgcaattttttcaacgtcttctaacgtttgacctggttcaggattatatgttgcaataatcattttttcttcttcagaaggtaagaaacttacaccgataactggtacaagtgcaagactaccaaccaatagaaggacagcgatacttgatgtaataattttgtgatttaaagcccatgcaagtatgcgtttatacccatttgctaatttacttggtttttcttcatgatgtacttctttttccctcatactctctttcttaaataaagagtgagctagcatcggtacgattgtaacagctactagtaatgatgctaataaagcgaagacgatagttaaggcgaatggtaagaacatttcaccaatcataccttttactagtccaagtggtaaaaatacagcaattgttacgatggtagaagacataattgggataaacatttctttcgtagcttcacgaattaaatcttttccgcgcaatttctcttctgataacgacatacgtcggtaaatattttcaataacaacaattgagtcatcgacaacgcggcctatagcaacggtcattgctccaagtgtcataatgttaagtgtaatatccatttgctttatgactaaaacagcaattaataaagaaagtggtattgaaacgacagagattaacgttgttcgaatatttcgcaggaacagcataataataacgatcgcaaagatagcaccgaaaattgctttgcttagcattgtttcaactgatttttcaataggtgcaccttggtcgaatgttgaaataatctctaaatctttatattttttctcaagatcttttactttatcttttactgcatttacaacatcaactgtatttgcatcagaggccttcacaatttgaattccaattgcttcttttccatttgttcgagaaatggattctgctttcccaacttctttaatgtcagcaatttcttctaatgtaactgttggaatcccgttcatagcagctggattcatttgcggcgtttgtgcaccagcgccggcattttgactaccttgaccgttaggtgaggaaggtatagctgggattttaagttcttttaatgctttaatcgttgtaatattgccatctacaacaactgatttttccgtgtctttaaatgtatataagccaagtggtaaagatacatccgatcccttaatcacattttttacagtatcttcacttagtcctagttctttcattttatctttcttgaagacaagctgtacttcatctacttgttggccagcaatttggacagatgcaacaccatcaagtccttttaatcctggtacaacattcttttctacattttcagttaaggtagctaaagattcattcttgcttgctacgcttaacgaaataacaggaaaagcattgaagtttactcgtgaaactttagggtctttaacaccatctgggagcttcacattcgtaagagcttctttaatttctgtttctgctttttccatatttttatcaaaatcgtattctactcgaatagaagatgcgttttgaaaagatgatgagctcacaacgttaacaccgcttaaattttgtagttgttcttccatcggctttgaaactttatcagctacttcttctggtgtagcaccaggatagaccgtagttactgtcacaatcggtgttgtaatatcagggattgtttccagcttcatattgagtccagagtagatccccgcaatagtaacaataatggttagtagccaaactgcgaacttattttttaacgagaaattgatgattttgttcatgtttgcgctccctttttattatattgaccaactggtcagtctaatacataatataactgaccgttcggtcaaacgtcaataaaaagagatggtataatacatttataatcagatgcgagattaaatttaggagagaagatatgaaagaaaaagagcgtttaattatagaatcggccatgaagttatttgctactaagggtgtaaatgcgacatcagtgcaggaaattgtgacagctagtggtatatctaagggagctttttacttatattttaaatcaaaagatgagcttttattagcgacacttcgatattattatgacaaaatccaaaagaaaatgctggatattgaacaagagtctttattaccacgtgaaaaatttgcaaaacaattacactgtcagtttaatgatatacaaaaacataaagaatttattattatgcatgcaagggaaaatgcaattccgtttaataaagaagtggaagaatttatgatgcggatgaagttagagtctcatgcattttatcggaatagtttattgtccatttatggtgaaaagattatgccatatttattggatttagtaattatagtagaaggcatatgccgtggttatttagaattaattattttacaagcaccagaaattgatttatcgtatgtcgctgcttttattttaaaaagagtagatcatttagtaaatggtttggtagaatcttcagaagaacctattttacatgaagaaaagcttggagaattcctttgtaaatcagagctcattaaggaacaagttaaagagcattttttaaaagaaattattgtatttaagcgtaatttagcggatcaattagaggatgatgagttgttagtaacgttagatgttttagaggcggaaatgcgattgcttaatccaagaattccggtaattagaggtatgttagcaaatttagaggcgtatccggaattaaaagaatttcgattacgccttataggatactacaatataaaaaattcttaatagaaacaagtaaaaaactccttgtgtacacaaggagttttttcttaaagactatttactattttgagaccattcttcaacatcccaaacttttgtgatccaatcttcatagaagtccggttcgtgacatacaaggaggattgttcctttatatgctttcatagccttcttaagttccgcttttgctgtaacatcaagatggtttgtcggctcatcaaatagtagccagttactttcctcacccattagcttacataaacgaacttttgcttgttctccaccacttaattgacttaatgggcgagaaatatgttcattttttaatccgcattttgctaacatcgcacgaatttgatgctggtctaaaccagggaatgtattccatacatcatcaattggtgttatattatcagctttaacttcctgttcaaagtatgcaggctctaagaagtcaccaaggcttgttttaccgcttaaaggtttaattttacctaagattgtttttagtaacgttgatttaccaacaccgttacatccaacaatagcaattttttcaccacgttcaatcgtcattgatagctttggtagtagcggatgtgtatatccgatttctacattttcaccttcaaagacgaagcgactacttgcgcgactttctttaaatgagaattccggtttaattgctgtttccggacgatcaataagctccatgcgatcaagttgtttttgacgactctttgcacgacctgttgttgaataacgagccttgttctttgcaatgaagtcttcttgctttttgataaactcacgctgcttttcataagcgtttatatgttgatttttattgatttctgctagttctaggaatttttcatatgtcgctgtatagcgtgtcatttttgtgaattctagatggaaaataacatcaacacatttgttcataaattccgtatcatgagaaattaataagaatgcatgtgggtattcttttaaataatttgttaaccaatgaatatgttcaacgtctaaatagttagtaggttcatcaagcaataatacttctggctgttcaagtaatagctttgcaagcaatacctttgtacgttgtccaccacttagtgctgaaacatcacgatctaaaccaatagcatcaattccaagaccacgtgcagcctcttcaattttcatatctagtaaatagaaaccacctgcttcaagtgcatcttgtatttctgccatttgttcaagaagttcttctagttcttctggtgtagcagttcccattttttctgtaacttcatttaaagctttttccttttcgaataacggtaaaaatgcatccgctagtacgtcacggatcgtacgtccaggcgttaaaacagtatgctgatctaagtagccgtaatgtgtgcccggtgtccattctacacgaccttggtcatgaataagctgaccagtaatgatattcatgaatgttgatttaccaacaccgtttgcaccaactaatccaacgtgctcacctgctaataatcgcatagatacatctttaaataatgtacgatcaccaaatgtatgtcctaatttttcaactgttaataagctcatagtatcctccgtccaacttgaaatagtaccttgaatcatgatactaaattctttcatataatgccatcatttcaaaatgtatattttttcaaaagaagtgtttgtaaatgttagtatataaaaaagttacttctacctacagaagtaactttttggttatgccttttgtttaacttcactaactttcttttcagctacaataaaatgcggtctacgttttgtttcataataaatacgaccgatatattcaccaataacacctaggaatatgagttgaataccgccaataaatagtatagcggaaatgagagtaaagtaaccaggaacttccacaccaccaaggatgatttgaacgaacgtagtgattacgtataaaagtcctaaaatggttgttagtaatccgagatatatagatagacgtaacggtttattattaaatgaaattacaccatcaattccgtaatttaataatttcgagaaggtccatttactttctccatcagaacgtaatacattttcatattcaatgattaattcgttataaccgatccaagaaaataagccttttgaaaatcggttgtattcacttaaagataataaagaatctactgctcttcgacttaaaagtctaaagtcaccaataccgtctactaattcaatatctacaaatttattcatcactttatagtaaagacgagagacgaaagagcgaacgggtgaatcaccagttcttgttctttttgcaatgacttggtcgtagccgtcgttatatccttctaacagttcttttattaacgtaggagggtgttgtaagtcagcatccataataacaattgcatcgcctgtagcatattttaaaccagctaacattgcagcttcttttccgaagtttcgactaaatgatatgtagtgtactgacgaatctgaactagctaaatcacgtaaaatatttaaagtatcatctttactaccatcattaacaaaaacaaattcataatcggtagttaatttatgaatttcaagagaagtctctgaataaaaggctcgaagcaccttttcttcattgtagcatggtacaacgattgaaagagtcatttttgacactccttgtttgtagtgggttaaaacaatgttatgcgtttttatatgaatctatccaattggatagattcatgattcattgattgctcattattgctttttaaaagaaaattttcgtcgtgcttttggatttttgaaaattagtaaagctatacagataattagtgagatgattgatataatcatacctaatttgaagtaaggtgtaacgtaagtcatttcgattacatgtgaaccttttgtaatgggaacaccgataaaggcagaattcgctttcgtaaattctgtttcttttccatcaatttttatagtccagcctttactatatgggacagataaatataagagcccgtctttatttgatttgatatccccttttaaataattgttcttataataaatattttcaagcctattttcagttagtttttttgtttctttttgtacactttcatagtttacaatatttgcttgcaagtcacctaattcatactcacctgccatatcaatagagatagttaggttttctggacgctcattgcccaaattgtaaacaaacctttctaacggataagagtatgcaccagcatcgtccccttttcctatcgtttttccattaacagttgcattgaatgtgcctgcattttttaattttaattctatcagtagatcaccaggtgtatcaggataattgataggtacaatcatatttccaaagccatgaacaattagtttattttcttgtttttctatgttttcgaattttgctttttccgttttaatagatactgcctttgatttaaggtcttgtttattaaaatggtttaatgaaaattcttttgtattattaacgacaacagcatgtaataataattgatcacgctgagcgaagtttaatttagaaaattcttcctcacttatagccgaatcatatacatatcctaacggtaaagcatagtcatttttgtaaatattatacggtcctacttgctgtaatagtttatatccataaggcacattctttgaatctgtatcagcacttaatacgcgatattttacacctagcatattttcaagtagtagtcgactatcagcttgataaaacattgaaggtgtatcgtacatttggaatacaccatatttatttttcataaagtcatggacataataattaactaagctttgatacgtacttaagccatgataaccttgtagcattggtgtgttatattcgctatatggattaagaatacgataaaagtctttatcattttcttgtatgtagcgaattgcagcaatttcttctttattatcatagcctggttcgtgtaacttttcagttgaaatctggctctgtccgtaaacggtgctaagtatattattcgcatacatataattcatagaaattgtgctaacgagtacattcaatacaactaaaaattgtatgaaaggtttggaaatataacgccataaacatactgtaataacagaaagaacgacagttccgagtaaaatgttatcaacgtcttgtaaaggtttatcagttacatttatatttgcttttctataaaatgcataaatgaataatccaatagacactaataaacttattaaataaggtaatttgtagtctttcttatgaataatcatccaatctagaatgtatgcaattgtttgggcaattacaaatacaaataaatagaaccatctagattgcattgctgaaaaaccattaaacacagaatatgtatatggaagcataaacagaatgaacatgaataacgtaaagaatactttatttttaacgagtttatcacgtataaacattccaaatacgattaagaataaaattaaagctggtaaagctaattgatgattttcagcattatacatgaagaaaatattttccattaaatctttataaaatttatcttcaaataataatggtatctcaaacttttttgatagtcgatcagcactaaatacggcattaactgatgggaggaagcaaacggcggctaaaccgagtgataatccatacaataaaccgattctaatataataagttagaaaagagacaatcgttttattttgttgtgtcgcaaagtattggaataatgcataaataaatatgaaaatacttgtgataaaagcaaaataaaagtttgatgctaacattaaagtagcagcgattaggaaaagtccgcgcttcttttcaataatatatttatcaagtccccatattactaatggtaaaaatacaatggcatcagccatgaaatcccatagtaaagagtggcggatgaaagtaatacaaccaccatatataatagcagcaacaaaagatgagaatgctgttttattatggtaacgtaaagaaccatatatgaataccatagctaaaaagttttttaaaatactcatgtataatttcacgtcatatacttgctcaagacttagtttaggtagtaacagtgtaatccagaaaaacggtgatgtgctgtaataataactaaactctccaaataaatctccacctaatccataatcaaaagaccaaaaaaggttgccatctttaaaggcatgttgtagaagaaacgtaaaaaaaccaaattgacgtaacgcatcccctgtaccagaaaaggcttgattagatgttaaaaagaaataatgaaaagcaaaagcgcacaataataatattggcataattattattgttttcttggaaaagaatttattattcggctttatgctcataaaaattgataatcctcctttgaaagtcgttacatgtagcaactagtttttaggtagcatataaaaacacaccaatttttaaaggtgtgttctttagttttaacatgagaaaatatatatttttgttgaagcatatatatttttacaagcgttgaagttcatagtttacatgtaatttagtataaggcattttcagaaagtaagtcaatttgagctggaatatatagcatttttttactgaagaaaaatgatggtatataaaaaagcaaaaagcttttccatttttaaataggaaaagctttttgcttttaagcatgtttgcgaataagcttttgttttataaatcctaaaacgaatccacgtatttgaggatcaattacaattccgattataccgtatagtataccagtaagagttaaagcaactaatggtggtaagttgattaatgcaattcggtatataccgtaactaataataaaggctaaggaattaaatataattcctttaactaataattgcatgcctttacgaataaagagggtaaatccaattaatagtgtaatttcggtaatgatggctgcggcagctgcccccatcattccatatttactacctaatacaatataacctatgatggcaacaactaatccaatagtcattgttgttgcacgtttccattgctggccaatcgttgttaaattatcggctagtggatagttaattgattgtaaaataaccataaacgctagaatagcaagagcgtcaccagcgggagcgtatttttctcctaataaactaacaatccagaaacttggatcagcaataaaggggatagaaattcccattcctaaaaaagacataagttttaattcaaaacttgataattttctatgttcttcaatatttttctcattaccaaaagcaaaaagtcttggataaaaagcagctgcaattactccaggtatttgatatagtacagcaggtattttagatgcagcaccaaagaatccaacttgcttatatgttgaaaccttttctaatataatagggcccaattgtggtaagagcataataatgattccgttgatcgtgaaaataagtagttgatctaaaatgcctttatcccaacccttatggactttcgtgtaacgtattgtcattataaaggcgataacacctgttacaagactagataccccgtacatggcagcaaccatcataagtgaccattggaaagacatccctagtaatagggcagcagcagctgttacaccttgtagtacagaaataatagctgtaaattgcatgcgttctgttacttggaagtaagccataccaacaccttgtaaggttgctccgaacattgttggtaggacaacccaatataccatcgcacgtaagtaagcatcgggatagaagaactgggcaaaaatagcgaaaagtacagaaattacgatagctaatattaaacgaatacgtaaataactacttattagcacactaatattagcatcgcttctcgttccttcacgcataaacgtatgtgttaaacctgcatctgtaaagtaacaaataacagctgaaactgctaacgcagttgtaaacataccgtaatcacttggagaaacatatcttgcaaagaaaattgttgcaatagccagtacaaagcggacagtaatgtttcctacaaagaggtaggatgcgttttttagaattttatttgttttcatgagaaaagacctttctattctttaggacccggttagtttgtcctatttgtaaatttaatttgttcacagaaagagagagtatcgttatattttcagtttaagaaaacagaaatttaattcgtacaaaccaaagcattgcatatagttttttactacgctttccattctttgaatagattttacggcaatatttccttatatcttttttgattaattgaacttgtgatttatctaatcgagagttttctttaatatatatacaagcgttattgatgactgtataagggaataaataagtctcaagaatctcaatcagtgactgagggtctttcgtaatgaagtcttgagatttattatgtacccaatctttcatacgattgaatacttctagctcttttgttgtttttaattcataatctttatacttagaagaaagatttccttctgataagattctataataagttaagtattcatcgacataacatacatttgtcaaactcataagtttaaataaaaactctaaatcttctccccaactacatcctggtgtaaaacgaatgttatgatccattacgatggatcgtttgaaaatccaagtacttgtttgagcaacaacttgatgtgttaggaatgcttttgccatatcacctttaataaagtttgttgtatgttcaaccttctcgcctgtttcttcgtagaaattcatataaccacaatagcacgcgtccatgttgtttttatgcatactctcgatttgtttctcaattttagttggatgccataagtcgtcactatcaaggaaagcgatatattctccgctagcattttcgatacctgtattacgggctaccgaaacaccttggtttttttgatgaacgtattttacttgccctgggtatttttcagcaaggtttttcacaatagaaggtgattgatctttacttccatcatctacaattacaatttcaatgtttttatatgtttgatctagtattgactgcatcgtttcttcaatatatttttccgtgttatacaggggtatgacaacagaaacaagttgcttttgttccatcatagaatttttatctcctcaagttttttatgtcttgcatcatatatacaagccttttggaaggaagaagattacaagaacatctgtataagtttaacgcatataaactttgtaaatcaactttctattgttgtactttgtataaaaagtatttattatagaacgtattgtgttgtaaaaatatagaaatatattttgaaaattatgtatctgaagggagaagatgagatgttagggcgatttactcgcaaatctaatataatccttttagggattattatgatagtcggttttgcacttcgttttgcaactttacaaacacatggtgcagatctatctatagctagcgatgatataggttatcaaaaaacggcaaatattttattggaaacagggatgttaacatatcatgaaccagataaaccaacgattcatattatgccgggttttccagctttattagctgttgtattttatttttttggaaatggcagtgaaggtctttttgtagcaaaattaattattatcctattaggggtacttagtattttgctaacttataagattggtacttatttattgaattctgctgcaggattaataggtgctttcttattagctgtgtatcctccagagattgttatggaaaatttaactttaacagaaggaccgtttctattcctttcattaggattagtatattggagtttaaaattagctgatactcataaaacgaaacatcttctgattgtattaattttctactttttagcactgtacctccgtgtacaaattgccttatatccaatcttactatttgggtatcttttaatgaaacgctacccattccgtattatgatgaagcaagcgattataagcataggaataggacttatcgtacttggaccatggtgggctcgcaattacattcaatttgataaatttatcccactaactgctggggcagggaatccgttattacttggaacgtatcaagggaaaggttacccagaaggtaaggatatgggggaacttgaaatagagttacatgcaaaataccctaatcttgaagcacatgaatttatggaattagaagaaaaaatagcgattgataaaatgaaggaatggtggaaaactgataaggaatctatgatagagagttatttagttttgaagccagaaattctttggaaaaaaccgtattattctatagagcataatattgaagtattcaatgtttctgcaaaggatatgaatgaaatatataattttattaagacgacgtttttaatatgtacagtactttcatttattttccttttaaaaaggtggagagagactacatttttatggtcaatccttttattgcaaacagctttaacatgtttttatgttgcatatgaacgatatgcattaccgttaataccattcttatttattataattggagttgggaccgtggcaactgttatgaaaattagtaaattattaattagaaaaaaatagtttgcaataaaaaacatcttaatttttttaaaaaattaagatgtttttttgtatatgttcatatttaaatagaaaactattctttatcggtttcaggttgcgttacttttaatttttgttttaataacgcataatcttgcgttaacgttacaagttgatgatgtaatttagaaatttttcttgttaagtcaaaaattaatatgaaacagaataatagtccaaataagaataaaacagatggaggatattctacgtgtaatagttggccaatccaatttataattttttcagtagaacttaaaatagccattgcaacacaaacaaaaatccataaaatagcatatttagtttctaaagctccacgacgaatggaattaataattaataaaaataataatagaatgaagataaatgaaaaggtaattataggcatttattatcaacctttcacaattttttgcatcaatatagcaaggcttactttaatcatgtaatatgcagatttaagaggtgtgatagaagattgtcccccttgacgctcttgcatatttacggatatttcattaatgcgtaattttttcttttttaaatgaataaggacttctggttctggataatcttttggataattatgtgcaaaaatcttaattacttctctattgatagcacgatacccagaagttggatccataaaggtttgttttgttagtactttcagtagagcagtaaaataaaaaataccaattcttctagaaatactacctttataggctgttttctctgtaaaacgtgaacctagcaccatatcgcattggtcttcagcaataggttttataattttgtacaaatcatcaggattatgttgcccatcagcatcgaactgaatcgcaatatcatatccattctcataagcgtatttataaccagtttgtacagctgagccaatacctaggttatatggtaagttcacaaggtgaacaggaaaatcatttacgatttgagctgttttatcatgtgatccatcattaataacgcaaatgcttaattctgtaaaatgctgttttagttttaataatcttgttaatgtatctgcaattgcttcttcctcgttatacgcaggaataataattaacgtttttggtattgaaattggtacctcaatagacattatcgcaccatcccttatatacttaattatattatagttatttttaaacgaaccttatctaatataccattaatagtatagcaaaataaaggaaaaactggtggattattttaggagacaaacagtaaataaaagataagaggtggaattttttacaataaaaaatacatgcaaggatgaaataaacctgtgcatgtatgaagtgagagtatcgtattatatattccatggcttacttaaagttaaaacttcagccatctctttactttttaaacgtcccttttttcggttttccgcgcgttctaaaccggttgtgtgtaaccaatgttcttcttcagtttcaggaagtacttgtggtacggatgaaggttttccatcttttattgccacaaatgtaatgaagcaagtagcagcaattctacgctcgcctgctaataagttttctgcgattacttttacgaaaacttccattgaagatttccctgtataacatacaaatgcttcataacaaacagaatcagcttggtgaattggagttaaaaaatcaactgaatcaatagatgctgttacgcaatgtttacgactatgtcttgcagccgcaattgaagcaatactatcaatttctgctaataatttccctccaaaaagtgtttggtgattatttaaatcgttaggaaaaacacgtgttgtcttaattgctttagattctcgcatgaatttcttttccatatattcagcccctatagtctgttttcaatcagaataatatgtgtaagcagattactcatattagatatttaatgaagtaaagtgtattccaaaagaggattatttaaacttctgtatttgtattcatgtaactgaaagaaaatttattttatctaaaatgtagtgtaaaagaggattcgcttacattgcaagtaaaaagtaatgactatgtatttgtcatagaaattccctatcagccgtgtccccattcatgatagaatcgttttgttatgaatggaaatagaggtgcaatggacatatgaatcatatacaaacaaatttttcatctttcttcaataaaattacaatcggtgcgatgctcgcattttttgtttatagttgttgggcagcatttgagacaagtaagcaattttttggaggaagtacaacaagtgtaacaatcatattagcaattttcgtcatacttattttgttagtggcatcaattctacaatatcgttttacagataaacaatttcttatttttcttataagtatatctatagttgtgagggttagtatgctgttatttgtagatgctccaataattggtgatatgaaagtgatgtatgagtctgcaaagcagattgcaattggtaataatatagggactgtaactcatttgccttttattatatatgagtcggtaattattcgtatatttggtgattcattattcgctttacaactatttaatgtgctattttgcacaggaacagcattatttatttatcgtattgcgggaatggtttttggagaagaatgcggtcgtattgcttctatcttttatgctctgtatattccaaatatattcatgagttccgtattaactcctgaatcacttgcaatatttttattttattttgcttgttacatacttttatataaaggattagatcatccttatatgtgggtgttttcagcgattttatttgcatttagtaatatggttttcccaatgggattatttcttcctatttttattacggtatatgtattattaatcgaagtatttcaatcagcaacgaaacaaaaggtgttactaaaaatgatagggatacttattctattttatagtgcccattttagtgtgaattatggaattaaggcaatgggattgtcacaatatacgatttcaaatgagacgtatgttcaatctgttttaattggaaagacgcaacatgaagaaaaaatatcgaaaaatcaaagtgtaacagagcatattgatcaaaagttaaaagagattgagggagaaagatttaaacttttagagccgatgataaatcagttttcagatgaaggggtaaattctattcttttcaaatgtgaaaaactgatatatatagccgtaacattgtttatgactatagctctattacacttccttattaagaaacaacaaaatgagggatatatgttgttcttatttttaattagtggctacgtattgttaaagctctttcaagtagatatggcatattacaatgtaattatgccgtcattgttcattttgcagagctttggtgtttatatgagttatgtgtattgtcaaaaaatatttttcagaaaataaaaagaatccattctggattctttttttgatggaagatgaaatttagtagtcagtgcagatgaaaagtatgcctgacttgaatttgatcccgctattttccaggcagtaagacccccacctcaaaatcagcgaaagcaaagaagttaggtggggggcgggctgcccgtaaaagcccgattggtgagggctgataatcaacgggggatgaacaaaacctccgttgattaaagtttcactttatcttatcgatttagttctagttgtaaattatcggctgttagagccatttgtgaggaatcatcttgaattcctttcattacttgtgaaatagcttgtagctcgtgttcaattttcttattctgttcttttgagttagacatatcttttacaatttcttggaagtatcgatctgttgctgacatactatccgttccttccgatacgagagagctaatttgtttcacggaagacgagacacgggtaatttgttcatttgttttttcaacgagctttgtaacgttaaatatagattctttcgtttgctctgataattttcgaatttcaccagcaacaacagaaaaccccttcccaaattctccagcacgtgcagactcgatagctgcatttagtgcgagtaaattggtttgctccgcaatcgatttaacaatatctatgatttcattaattttgttagaaatattaaggagttcatgagtatctgtaataatcgtttccatattcatttgaatagatcccattcgtttgttttgctggtttaattgttctttccctttattggctttttcttcagatgttgtagctaatgatgtacctgttttagcaatctctacaatagtttcagatttggcggttagtttttgaatagaagagcttgttttttcagatacagcagctagttctgttgcgatatgcgtaattgtcatagcagttagttctttttctttctcatgctctttttgcattctttcatattcagattcataagctgcaagaacaagttcttgttcaagagtaaataatttatttataacatttatagaataggaaaaatcatcgattgttgttatttttgtttgcaaaatcttcatgatagagcggaacaattcttgataagcagcagtataccattttcgatgtaaaccaatttgtacatgccttttggcaatcctaacacgctgttcaataaaatcttcatgcatattgccgctgaataattctttaatatgtgtttttaaagtttgttttagttttggaatagagctgtaacgttcaataatagtaattaaattaggttgttttgtaatgttggcatagaatttttcagtaatccaatcaatttctgcataaataaaaggctgtagtacttttacaacttgtaaatcttcttttgaaatatgtagcatatccatttgaatttttaattcagaattagtagggacattaaaagttatttgttggtccttacttaattcgattatactggcatttgttttattaatattttttttgaaaaccccaagcatcattcttccccctgtatataaaacgttttcaattttaaaactaatatagagtaattatatatgcttatatataattactctatattagttcgttgaatagtatataaattaagagaattctatctagaattctcttaatggcctttattaattttagcatgtgttttaaagaaaacagggaaatgaacattatatattacagtgacgacacgaataatgaatgttactaataaacaaacatagaaagctaacacgtgcgcccccatagcgtgtgtgattaggaagctaattgctcctaagatagaagcgattgcgtaaatctcttttcggaatacgtaagggatatcttgagcacaaatgtcacgcaaaataccgcctccaatacctgtaatgactcccattgaaacaactagaaatgaggcgtcaacatgatgtgacattgccgcatttgcaccaatagctgtaaaaacacctaagccaacagcatcagaaagcataataacgacttgaagtttattgatgcgctcaaaaaacatgcaagtaaataatgctgataatacacttacgaaaaagtaaatgggttttacaaatgcgacagggggcaggttaccaatcatgatatcacgaataataccgccgccgagcgcagtagctacagctaaacaaaggacaccaaataaatctaaatctttttttaaaccaactaatgtaccagaaatggcagcggcgataatgccaagaaacgtaaatatatcgattaataacatggccttaatcccttcctcttaaagatgttccagagaaaaaatatacactaaagtattggaaataacaattacttttcgctacatgtagaaaaacggataaaattcataaagaaagcgtttgaaaatgtttggaaaatagccataaagtaatttgaaaaagatatgaaaagattaattttacattttttgatgttgtttatttggtaaaacattacaattataggtaggttatttatatttgtataaaatgataaaaaaatatttatatactgacaaaaataaggggatggttgttagatagattttataaaaataggggagtatagctaaaggacgataatttctattactgattaatacttgtcctggctagttttagctggaaaaatagttctcgatttgaatatgagttatgttataattgctaggtgtgtttgaatgataaaaaattatgattaaaagataatgttaagattttgtatggaggtcttggaatgttagcaaatcaagctagggttagatttgagcattttttgctcttttttattattttacagcctgttttagatttattaacgtctcttagcatcactttattaaagtcaaatgctaccgttggaattttagtaagattccttattatggctgttggtggtatttacattttaattcaggcaaaagagaaggaaaatagaaagtttttaatttatcttatattgttagccggagttttaggtataggatttattaataacaaactagttaaggatcctattgtacttagtgaagaggttaaattcgttgcgaaagcattatatatatatatcatgctgggatcatacattttagctttaaaatcattgaaaaagacagttaatattagtgataaggttcgaaatagtattgtatattctacattaatcattaacgcaattatggttatttctatttcaacatctactgactttggtagttatgaatggatgaaggttggttctcgaggttggttctatgcagggaatgaactaggttcaatcttagctattattttccctattgtagtactatattctatccaaaaaacaaagagctggaaacacattctatattggattccatcacttttaatgatttattcgctaattcaagttggtacaaaagtaggaatgggctcaattggtgctacgctagcggcagcaatcgggattattttactacaattattatttgatagaaaaaatccgaacaaaaaatcccttgcacttaatgcagtaattgctattgtcctattagctggtgtagtcggaacgtttaaacaaacgccattagcacaaaatatgggtattcacaataattatttatcagagcaaaatgtggcacagcaaggtcaaaaagaaaaagaaattaaagagaagctgaaaaaagagcaagaacttaaagcaaaagaagaaaatcatcataaagttgaaaagccagaagaaaaggcgaagatagaagaggaagttaagaaagagcttgagaaagagcaaaagaaagaaaatcaagaaaatcttattttcagtggacgtcaagtatatgaagaaagacataagcagttctttaaagaagcgccaatgtcacaaaagttattaggaatgggttatgcaggtaactttaaatacaatgaacaaaagcagccagatccaaaactaattgaaatggacttccatgattggttttatgatttcgggattattggctttgtattactaatgattccatttatttattacgggctaagaattctactagcatttgctacgagatttaaggacatatttaatataaaatatggaatgatttcagcaagcttattgttagcgttaggtattgcttatattgcaggacatattttaacagcaccaggagttgggatttactttgtagtggtgttagcttatctaatagtagacctagaaattgaatgataaaaataaaagctaacttttgttagcttttattttttagtacagtaaaataaaaatagatggaaacgtagcgaggatttaaaggaggaaaaaatatgaaaatattgcatatgaatgcaggagcagaagatgggggagggaaaacacatattatttcacttctcgatcagtttccaactggtgaagtagaattagcagtatttgaagatggaattgttgcgaaggaagcaagggagttagggataaaagtccatgtgttttcacaaaaatcgcgctatgatttatccattttaaagaatataagtgaatttattaataaagaaaaatttgatgtagttcatacacatggccctagggctaatttctatgtttctttaatgaaaaagagaataaaggcaaaatgggtaacgactattcatagtgatccatttcaagactttactaaacagggcttaaaaggttggatttttacgaaattaaatttgaaagccttaaaaaatatagacttatttttcgttgtaacaaatagattgaaaaaaagcctggcagcattaggtatttcaaatgaaaagatgcatgttatttataatggaattgaatacgataaggaaaaagcagaaggctataataaaaaagaaatgttcaatattgatgaagatgtatttacggcaatccaagtagcacgattacatcctgtcaaaggacatgaagttttattcgatgcgttacaacaaacaaaattagagaaaattaaagtattattagttggcgatggcccattagaagaaaatctaaagtcattagctactgaaaaagggattaacgataaagtagagtttttaggacatcgtcaagatgtaaaacaattatttgcgtcgtcacatgtaaatttattaacttcccatagtgaagggttcccactagttttattagaagcggcaaatcaacgcgtaccatcaattgtgactagggctggagaaattgaaccattaatcgtagatgaaacttacggatggattgtgccaacaggtgatggaaaggcattagcattagctttagaagaagcgtatgataagtggaaaactggagagttagcagcaatgggtaaacatatttatgagcatgctactatgaacttctcacttcaaaaactatatgaagatacaaaggaaacatataagcaattaatagcgaaaaacttgtaatgatagagaggatagttaactatggcagtacaaacagttgatattctaggcgttcctttttctacaatgacaatggatgaaacggtccaatatttaaaagaacaactagaagcggagcgaactcatacgtttcaggtagtaacagcaaaccctgaaattgttatgtgcgcaaaaaaggatgaaaagttctatcaaacattattgaatacagatttaattacacctgatggtattggggttgtaaaggcaagcgggatgcttggtacacctttaaaagaacgtgtagcaggttttgatttaatgtgtaatttacttgcgaagttatcagaagatagtaagccggtatctgttttcttattaggtgcaaagccgcatgttgtacaagctgcagcagatcatttaacaaagacatattcagctgtatccatcgccggtatacaagatggttattttaaacaagaagacgaagagaatattatttctcgcattcaagaagcaaaaccagatttattacttgttgcacttggtttcccgagacaagagaactttatacaaaacaataagcagcgtttagaaacgaaaatggctgttggagtaggtggaagtttagacgtatgggctggagaggtaaaacgtgcaccaaaatggattcaagcaattcatttagagtggttttatagattatgcagtaatccaacacgctggcgtcgtcagttagtattagcggaatttttaaaagaagtagtgcgttcgaaaaagtagcgaaatatcgctgctttttttatttgttcatttttaataaattgaaactttaatcagtgaggcatccccacagattattagctctcaccaatcgggatagacgttttactttttgggaatgatgaaggagaattttttacacaaaagtattttacttatacaattcacacatgtaaaatgatgtgtaaagacacctgtgtgaggaggacttctagtgggcaaggttaaagaaatttcgaagcgcaaactactaggtatagctgggcttggatggctatttgatgcaatggatgttggaatgctttcatttgtaatggtagccttgcaaaaggattggggattaagtacgcaagaaatgggctggataggcagtattaactcaatcggtatggcagtaggagcgcttatttttgggatactatcagataaaatagggcgaaaatcagtctttattattacattattattattttctatcggtagtggtttaactgcattaacaacaacacttgcgatgtttctcgttttacgctttttaattggtatggggcttggcggagagcttccggttgcctctacactagtatcagagagtgttgaagcgcatgaacgtgggaaaattgttgtgttattagaaagtttttgggcaggtggatggctaattgcagctcttatctcgtattttgttattcctaaatatggttgggaagttgcgatggtattgagtgcagttccagcattatatgctttatatttaagatggaatttaccggattccccaaggttccaaaaagttgaaaaaaggccatctgttattgaaaatataaaatcagtttggtctggggaatatcgtaaagcaacaattatgctatggattctatggttttgtgttgtcttttcctattatggaatgttcctttggttaccgagtgtaatggtgctaaaaggatttagtttaataaaaagtttccaatacgtacttattatgacattagctcaacttccaggatatttcaccgctgcttggtttattgaacgtctcggtcgtaaatttgttttggttacgtatttaattgggacagcttgcagtgcttatttgtttggggttgcggattcattaacagtattaatcgtggcaggtatgttactatccttctttaacttaggtgcttggggagcattatacgcctatacacctgagcagtatccaacggttattcgtggtacaggtgcaggaatggcagcagcatttggtcgtattggtggtattcttgggccactattagtgggatatttagttgcttcagaagcttcactatcattaatatttacgattttctgtggatcaattttaattggtgtattcgctgtaataatacttggacaggaaacgaagcaacgagaattagtataaagtgaaaatttgaacgtatccctgaccgtttattatcctacactactcggctctttataggcagttagtgcgggataaaaggggagaggaaaccgaagtggtttccttttttctgtttttttagataaataatggtatagtaagaaaaagggattatttcttataaaagcgaatgtatacaacaggacatatggacaaagaattaggtggttgaagaaatgaaaattttactgatcatggaagaggcagaagagagaagagagttagctgaaaatttcactgaaaatatgagaaatgtagaatgttttgaagcaaagacaggaacagaatctttatttatgatgaaaaaacatataccagactttgtttttttaagttccaaattactagatggtactggttttgaatatgcaagtttattacgagaaataaattgctatacaaaatttatttttgtaggtgaaaacatagaagaatctattacagcttttcgtttccaagcattttattatttattgcgaccatttcgtgaagaagatttacaatttcttttatataaaataggtaaagaacaaggtgagaaagcaaagagttatttgcgaaaactaccgatagaaagtcaagagggtatacgatatattctcccagaagatattgtatatgtaagtaaaaataaagaaaataaaactgtttcaatttacacaacgaataatcagtatatttcaacatatacacttcaggaattagaaaataagctaaatgcatatgattttttacgtgtacataaaagctatttaattaatatgtcatatgtaaaagaactgaaaccttattataatggcacgtataatttgtatttagataggtatgatgagcaaccgattccagtcagtcgtaattatgtaaaacgccttcgaaataacattgaattatagtaggtaatgagagtattttaacatgataaactgaaaatccttcatgatagggaggattcaagttaaatattcagaaaatttagtacaatctccactaagaaatagtattgggggaattgtatgtgaagacattgaaatcgatcttactttggggcattattacagcagtaggagcaggtgcttttggggtagtagctttatcacaaggtgaaaccattaatgctgtatggctcttagtagctgccgtatgtgtatatgcagttgcttatcgcttttatagtagatttatagcgagaaaggtttttaatttagatgataatcggcaaacaccagcccatacattaaacgatgggaaagactatgttccaacaaataagtgggtattgtttggacatcactttgcagcgattgctggggcgggacctttagtaggaccgattttagcagcacaaatgggatatttaccaggaaccatttggattattgttggggtagttgttgcgggggctgtccaagattttgtcattttatttgcttcgatgagacgtaatggtaaatcgttaggagaaatgattaaggatgagattggacctgttacaggactaattgcaatgataggtattttaggaattatgattattttattagcagtattagcgttagtcgtagtaaaggcactaatcggaagtccttggggaatgtttacgatagcagcaacgattcctatcgctattttaatgggagtttatatgcgctatattaggcctggtcgtgttggagaaggatcagtaattggtattatcctacttattttatctcttgttggaggacagtatgtagcagaaaatccaacacttgcaagtatgttcacatttagtggtgaaacaattgctattatgcttattgtatatggatttatcgcatcggcattaccagtttggatgcttttagcaccacgtgattatttaagtacatttttaaaagtcggaacaattgtagggttagcaatcggtatcttaattgtagcaccagatttacaaatgccagcagtttcgaaatttattgatggaactggtcctgtgttttctggaaacttattcccgttcttatttattactattgcttgtggtgcagtgtctggattccatgctctcgtttcatcaggtacgacgccgaagatgatcgagcaagagggacacgcacagccaatcggttatggagcaatgttaatggagtcgtttgtagcagcgatggcgatgattgcggcttgtgtattaacaccgggaacgtattttgcaattaatagccccgcagcacttatcggtacagatgtttcgcaggcagctcaagttatttcctcatggggatttgctattacaccaaatgaactaaaagatctcgctgtaaatgttggagagcaaacaattttatcacgtacaggtggtgcgccaacattagcgataggtatggcatatattttctcacaagtaataggtggaacggccatgatggcattttggtatcattttgcgattctctttgaagctctattcattttaacaacaattgatgccggaacgcgtgtcggccgatttatgattcaagatattttagggcatgtatataagccatttgggaaaacggattctacattagcgaatgtaatcgctacaacattatgtgtattagggtggggatatttcttataccaaggggtaatagatccgctcggtggaattaatacattatggccacttttcggtattgcaaatcaaatgctagcaggtattgcattattacttggaacgacaattttgttcaaaatgggaaaaaaggcgtacgtttgggtaacacttattccaactgtcgggttgctgattgtaacgatgacggcgggatatcaaaagctatttcatgaaaatcctaaaattggatttctatcgcatgcaaaggtatttcagggagcattagatgagggaaaagtgttagcgccagcaaaaaatgttgctcaaatgaagcaaattattttcaatgattatatcgatgcggcgctttgcggaatttttatgatagttgtaatcgctgtgttaatttcagcacttcgaatttggatccaagtattaagaaataagccaatgccgttaaaagaggcaccatatattcctagagatgaaagtgagtcgaggaactatgcttaaaaagttgtggcaagtatggggtgaaagaaaacgctttattagtttgctcgttggggtaccaagttatgaagtatatgtggagcatatgaaaaagcatcatcctgaagaagaggttgtatgtcaaaagcaattttttgctgaggcacaagaagcaagatttaatgcaaagggtggaaaaatatcacgctgttgttaatgaaaaagggcgagttttcgccctttttatttttttgctgtttcacgtggaacagcaaaaataaacaaaatatttgggaattaaaggtatttcgtatacaataaggtgaggaaggggatagatggaaaagtagggagattattttatgttaagggacttatttgtaaatacaacaattattctttcctttatttttattggaggtcagcttttaagggataagccgttaaaagaaggattctcttttgggcagaaatgtgtagtaggcatttttactgggatactaggtatagtattaatgtatttcagtgttcgtgttggtaccattctattggatttacgctacttagctgttattctagctgttattattggaggaccgatagcgagtaccataacaattggtatgattttagtaactaggctgttgtttatggattattcattagcttctcaagtggctttttatacaatcattgcgataggaatagggagtatctttatttcgcgcatgaagctttctttagggggaaagtgggtatggttacacacatatattttatctattctaatcccagcgttatatatatggttaattaaagagatccacatagtgggattatatttaatttctagtattattacaggttacataacattcataagtgcaaattatgttttacaatccaatgagttatttcaaaagatgaaacaatacgcaacgatagatgcattgacaggtttaggaaacgtaagacagtttgatttagagatgaatcgtcatattagtaataagaacatgaaaaatgattcgttttgtttactacttatagatattgaccactttaagtatgtaaatgatacgtacgggcatcctgcaggggacgaagtgctaaaacaagtaggatgtattttacgagaaacttcacaatttccagatttggcttttcgaaagggtggagaggagtttgcacttttgataccgaataagggattagcttacggaattcttacgggcgagcaaattcgtacagctgttgaaagtcactcatttcaattgttagatgaaacgaaaataaaaattacagtttcggtgggggtttcagaatatgaagaatcaccggagcaatttattcaagcggcagatgatgcgttatactactcgaaacgaaatggtagaaataaggtcagctctgtatcttaaagataagatgaccagaagacataaagcttataaaaaacactcacagaggcaatgtatgaactttgtgagtgttttttatttatatattagacaagttcttttgatacaacaaatttacgatatgcaccatggtgagttggacctacgtattcgttaattttgaatgagtaacgaatagcagctgtgatgaattctttagcagtttttactgcttctttcacaggttttccttttgcaagttctgctgtaattgcagcagaatatgtgcaacctgcgccgtgtgtatttgtcgtatcaattttttctgattctagaaggtcgaatgtttctccatcatataggacgtcgattgcagtttccgtaccaagtttgctaccgcctttaattaggacgtatttcgcacctaaagcatggatctttttcgctgcttctttcatgtcttcaagagaattaatctttacgccacttaattggtaagcttcaaataagtttggtgttacaactaatgcctttggaacaagaacgtcacgtaagcaatcattcgtttcaggatgtaatgcttcatcagcacctttacataccataacagggtcaactactacatttttgaaattgtgcttttcgattgtttctgcaaccatttcaataatttctactgatccaagcatacctgtttttaaagcgtctacgccaacaccttcaattgttgtttctaattgtggttttaatgtagaagctgggattggaaatacgttatgtgcccaaccgttatgtggatccatcgttacgattgttgtaagagatgtcattccgtatacgcccagttcttggaatgtttttaaatctgcttgtataccagcaccgccacttgtgtcagaaccagcgatagtaagtgctttatttaatgtcattatgaaagccccctcgagtgatataatgaaaactatgttctcaccattatatcaatgttacgaataagtacaaagtgaaaagtagatgatttattttaagagctatttaaaatcttgtatgcaggagactgagtatgtttcgagataatcgtacaaatgaattagttatattaaaggaaattgcagaaacattaaatacatcaaatgatacatatcatgtattgcaagctgtcctagagaaattactaagtgtaacaggtttaacgacaggatggatttttcttgcggatgaaaatgggaagtatacgaagttaattgattatcaattaccagaggcacttacatatgaaaataaacgcccgatgtgcgaaggtgaatgttggtgtttacgaggttttgtagatggaaaattagagagagccgttaatattattgaatgtaaaagaattaataatgcaattgaatataattggggggatacggagggcattcttcatcatgctacggttcctttaaaagctgggggagaaaaatttgggttgttaaatgttgcaagtccgggtaaaacacatttttcagaagaagaattagtattactccaatcggttgccttccaaattggtacggctttaaagcgaacaaaattatatggaaatgaaaagagaagagcacattattatgtgaaattagagcgtttcattcaagacttaaaaacgattcataagtttaatgtactacctgaaaaagtggtaaatcacgtaggtgaagtatttcaatggaatcaagtagcgctttttattagggaggaaaaagaattatctctgcgagcgtcttacgttcaggaagagttaaaagaggatataaaagaggcggccaagagggcgttagaacaagatgaaccagttctaataaaacatcaaataggacataatgtacatctaaatcgagctgttattgctacaccaatacatattcaaaaccatatatttggtgttttatgtgttagcctgaataatggagagtttgatgctaatacaatagacgtaattcaagcattatcgaaccatgtttcgttaataatagagaatttgaggttaaacgagcagcgccgtgaacttgtgcgaatggaagaaagaaatcggttagcaagagatttacatgattctgtttcgcaaaaattattttcattaaccttcatgacaaaaggcgccgaggcagttttaaaaggtaaaaatgaaaaggtagatcaatctttgcatgagatgcgtgaacttgcgcaaggagctttgaaagaaatgaggacattaatttggcagcttcgtccggcgggattagaaaaaggattattgccagctctaaagcagtacggtgaaaatttgggactgaaaattagggagcaagttacgggtgttcgtgatttacctcgtgtagtagaagaagctttgtggcgcataggccaagaagcactgaacaatgtaagtaagcatgcaggtataaaagaagcgacgatttattttacagtgaatgagaaaaatgtatcattagaaatagttgatcaaggaaagggatttgtggaaaagaatataaaagaaaagaaatcactaggtatgactacgatgcgtgaaagagtagaattagttggtggaacaattaaaattgtaagtagtaataaacgaacgagcgtaaaagtaaatgtaccattatgatgtgaaaatgagggaagtttgtgaaaataaaagtattgttagttgatgatcatacagtcgttttaaaaggattagcatttttcttaagtacacaggaagatttagagttagttggagaagcgaataatgggaaagaagcgttagtgaaagtaggagaaacaactcccgatgttatattaatggatttatacatgcctgaaatggatggtgttgaggcgacggcatatattaaaaaagagtatccaaatgtgaaagtaattgtattaactagcttttctgatcaggcgcatgtgttacctgcattaagggctggagcaagtgggtatattttaaaagatgtagaaccagatcagcttgttgaggctattcgaagcgcatataaaggtaatattcaattacatccggatatagcaaatgctcttctctctcaaacattacctgtagaagaaaaggaagaagaaccttctattcaagtggatgtgctaacagcgagagaaaatgaagtattgcagctattagcgaaagggatgagcaataaggaagttgcatctgttttagttattacagaaaagacggttaaggcgcatgtaagtagcattttgagtaagttgaatttatctgatcgtacgcaagcggcattatatgcagtgaaaaatggaattgtataagacgaaagtcgtaagaccaagttcgcctttggaaggtggactttttttatggaaaaatacgtctatgtgaggacgaaattgtcattatataaagataaaatatgtttgtaagcaacaaaacaacaattacaagggataccttttttgaaagcatataacaacataagagtgagtactaggaggaataaataatggcaacagttttattcgttaaagcaaataaccgtccagcggaacaagcagttagtgtaaaattatatgaggcatttttagcaaactataaagaagcacacccaaatgatacagtagtagaacttgatttatataaagaagaattaccatatgtaggcgtagatatgattaatggtacattcaaggtaggtaaaggatttgatttaacagaagaagaggcaaaagcagtagcagttgctgataagtatttaaatcaattcctagaagctgataaagttgttttcggcttcccattatggaacttaacgattccagcagtattgcacacatatattgattatttaaaccgtgctggtaaaacgttcaaatatacgccagagggtccagttggcctaatcggagataagaagattgcattattaaatgcaagaggcggcgtatattcagaaggtccagcagctgaggtagaaatggctgttaaatatgtagcaagtatgatgggcttcttcggcgcaacaaacatggaaacagtagttattgaagggcataaccaattcccagataaagcagaagaaatcattgctgcaggtcttgaagaagcagctaaagtagcaagtaaattttaattaaaagtataatcgtcactcgaaaaaacagcattaacatgtaagcgttaatgctgtttttttatatttttagttcatcagcaagtttttctaatgtatttcgatcttgtatataatatgttcggccttcttttcttaaataatttagttggcaaaactgatttaatacatataaaagatgacggtagctgacatttaaatattccgaggcctcggtatgcttttctatataacaattattttgctctgttaataaaataaaagcagctaatcgattttcaaaaggataactatagttttttgcgtgattttcagtgcgagtaattgtcttttctccaataaatttacataagtgctgtaaaaacgttgcatcttgtaataaaagttgctgacaatctttaagaggaagtgccaaacacacacaatcttctagtacttcaacggacttagtaatattttctactcctattaatcctaattccccgataaaagatggtgcttgaataaaattaattaatgaaaccttcccgtttttatgactcatatatatttttgctttcccagaaattaagtaatagagataagggagagcatttccttcgctacatatcatctctttcgtttgaaaagaatgcagctctacatatggcaagacatgaaatgaaaatagggtatggaattgatggattcgcatgtattgataaatttcttcctcatttttgctgattttcatattttcacccccatgtatagtatgagatatctcctattatctttacaagaatgaatgatacgatttatgtaaatttgtttttgtagaaaagagagtgtgatgaatttatgaaaaaatataaaacattgttatttgatgtagatgatacattactagatttccaaaaggctgaaaaagtggctttacgggtgctttttgaagagaagggaatccctttaacagacgagatagaggctcgttataaaaaaataaataaaggtctttgggatgcttttgaaaaaggagaactatcacgcaatgaagttgtaaatacaagattttctctgttgtttaaagagtatggagaagaagtagatggaatattattggaaaataattatcgtaactacttagaagaaggaaatcaactcatgcaaggtgcgtttgaatttataaatcaaattcaaggagagtatgaattgtatatagtgacaaatggtgtttctaagacgcaagataagcgtttgcgtaatgcaggtttacattcattatttaaagatgtttttgtttcggaagatacaggttttcaaaaaccgatgaaagagtattttgattatgtttttgaacggattcctaactttgcacctgaagcagggctgattattggggattcattaagcgctgatatgaaaggtggatatgtagcgggaattgatacttgttggtttaatccagaaaggaaattaaatgatagtgggattataccgacatatgaagtgcataattttgaggagttagaagcgttattaaagcagcatgtgtaataaaaaaataggcagtggagctttcatccccactgcctatttttattaatttttattttcgttatgttttgggagcggaaaggcattcccgatagcagctgcaccaagcatgggcaatagtaaattaagcgggaaaaacataagtaatagtaatgttatagctattggctttcgtaacgcatagcttgaaattgctgtcgttacgatggcaacagatgctactggatctataggaagaatagatgctacagcgtatccgatacttgacccggaaaatataattgggaagatatgtccacctcgccaccctgtgttcaaacaaacggcagtaatgcacaactttaaaatccctgaaagaagtagtatccaaaaagataaatggctccattcaacaactaattcttttaattgatgctcacctgaaaataatgtgtacggaagaaaagttcccgcaattcctaataaaataccaccgataattccgagtgtcagtttgtattccctaaaagggtgaattaacttctctaatgtgaattctaacttgaaataaaagaaaccaactatagcaccgatactagcaagtggaagaaatgcgatccattcattgaatgaaagtgcaccttccccgaaatcaacaataaaggatccacgattatcgagtttactcagtagtaaataaacagaaaaacctgcgaaagtagtagctaagtatacaatcgccttttttcctttagaaaaagcagcaatttgttccccctcattttcatttggtgctaaataaccgaataatggtgcgttaaaaatgacacttaaagtagctccaattccgatctcggttagctcattcatactctttaaggcaaatttaaagcgatcccctacccatgtgcacagtccgcctataattccaactagtgcggcttctggaccaagactagcaccgaaaattaaaacaataatcgctgttaaagtagcctgatggacaaagcgatattcgattcgaccagtttttttatattcagccatcacttcaggcataaggcgtgggtatgtaccgaaatgtttttgtgatagaccaacaaggaccccgccaattattgttacgcaaagggtgtaataagagggaaaagagagaacttcaggcaagtatccccaaataaagtggattccaatatttattgtgactaaaaataaccagactgtagctcctactatagatcctagaagaatgccatatagagcaagtatgtactgcatatcttttttatttgtcatgttatacctccgttatgtaaatcttagtaggtaaaaaagtgaaatatactagtgaaaaatggattgaatatatatagtatctttttgaggagatggcctattcaacatataggttaactttaggggaatttgaatttataggttaaattacttatttaattttatagactgatttgaggtttttaaaggtcttttttgaaatagactagaatatatttcttttgttgctttatatgaaactgttaacatttattttagaacattcagaaaaaccgtttgacattaggaaattattgctataaaatcaacggtaattgcatagtcttatcaagaaaaggtggagggacaggcccgatgaaaccttggcaacagccgtataacggaattgtgccaaatcctgcaggtagtaatcctgagagataagaaagagcctttagagcgtgttttcaaactgctcctttcttgttttcaggaaaggggcagttttttattttgtataaaagaaaggagaatgagagatgggagaatcatggggaaaaggaacaatttgtgtgcaaggtggctatacgccaaaaaatggtgaaccacgtgttttaccactttatcaaagtacaacatataaatacgatacttcagatgatttagcagccctatttaacttagaggcagaaggatatatttatacacgtattggaaaccctactctagccgcatttgagcagaagttatcagatttagaaggcggtgtaggagctgttgcaacggcttctgggcaagcagctattatgctcgcagttttaaatatttgtagtagtggggatcatttactttgttcttcaacggtttacgggggaacgtttaatttatttggagtgagtttgcgtaaactgggcattgatgttacgttctttaatccaaatttaacggcagatgaaattacggcgcttgctaatgacaagacgaaacttatctatgcagaatcgttaggaaatccagcgatgaatgttttaaattttaaagaattttcagctgctgctaaagaattagaggtaccttttatcgttgataatacattagcaactccttatttatgccaggcgtttgaacatggggcaaatattattgttcattctacgacgaagtatatcgatgggcatgcgagctccttaggcggtattgtaattgacggtggaaactttgattggacaaatggaaagtatcctgaacttgttgaaccagatccaagttatcacggtgtaagttacgttcaaaactttggtgcagcagcgtatattgtgaaagcacgtgttcagctattaagagattatggaaattgtatgagcccattcaatgcatatattagcaatattggcttagaaacattgcatttacgaatggaacgtcatagtgaaaatgctcttgcagttgctaagtggcttgctaatcatgaacgtattgaatgggtgaattatccgggcttagatagtaatgaaaattactcattggcacaacagtacttgaaaaaaggtgctagtggtgttttaactttcggtattaaaggcggattagaagcagcaaaagaatttatcgcaaatgtaaaactagcaactcttgtaacacacgtagctgatgcacgaacttgcgttatacatcctgctagtacgacgcatagacaattaaatgctgaagatcagcgtttagctggtgttacatctgatttaattcgtttatcagttggtatagaagatgtttctgatattattgcagatttggaagcagctctagttgggggcaaaacacatgccgatcataattgataaagatttaccggctcgcaaagtgttacaaaaagaaaatatttttgtaatgacgaaggagcgagcggaaacacaagatatacgcgctttgaaaattgctatattaaatttaatgccaacgaagcaagacacagaggcacaattacttcgcttaattggaaacacaccgttacaattagatgttcatttgcttcatatggaatcacatctatctcgtaatgtaacgcaagaacatttaacaagcttttataaaacgtttcgtgatattgaaaatgaaaagtttgatgggctcattattacaggagcgccagtggagacccttgcttttgaagaggtagattattgggaagagcttaaacatattatggagtattcaaaaacgaatgtaacatctacgctccatatttgctggggagcacaggctggcttgtactatcattatggtgttccaaagtatccccttaaggaaaaaatgttcggtgtatttgaacatgaagtttgcgagcaacatgtgaaattgttacaaggatttgatgaattgttttttgctccgcattctcgtcatacagaagtacgagagaatgatattagaggagtgaaagacttaacattgttagcaaactctgaagaagcaggtgttcaccttgttattgggccagaaggaaagcaagtgtttgcccttggacatagcgaatatagttgtgagacgttaaaacaagaatacgaacgagatcgtgacaagggattaaatattgatgtgccaaaaaactattttaaacataataatccagatgaaaagccgcttgttaggtggaggagtcatggtaatttattgttttctaattggttgaattattacgtgtatcaagaaaccccttatatattgtaaagaaggattgtgtaacacgtggcaacgttttccttgtaaagattaacctttatttttccgaatgttcaaaatacattgtttttcagattttttactcatataatttcatctaaacacaatttttgaggggtggacagtactatgaaagaaattcaagttgggttattaggtcttgggacagttggcagtggtgtggttcgtattattacggatcatcaagaacgactcatacaccaagtaggttgtccagtgaaggtaacgaaagtattagtgcaaaacattgagaaagagagagaggtagaggtaccttctactctattaacacaagatgcaaatgaaattttagataatccaaatattgatgttgtcattgaagtgatgggtggcattgatgatgcaaaatcatatattttacaagctttaaaaagcggaaagcatgttgtaactgcaaataaagacttaatggcattacatggagctgaattattagcgacagcaaaagataataaggctgatttattctatgaggcgagtgtggcagggggaattccaattttacgcagtatcgtagaaggactttcctcagatcttattacgaaagtaatgggaattgtaaatggaacgacaaattttattttgacgaaaatgtcagacgaagggagagcatataacgacgtgttaaaagaagcccaacaacttggatttgcagaagcagatccaacatcagatgtagaaggtttagatgcagcaagaaaaatgacgattttagctactctcggtttctctacaaatgtagagcttggagacgtgaaagtaaaagggattacctctattacagaggaagatattgaatatagtaagagcttaggttatacaattaaattaatcggtcttgcaaaacgagatggtgaaaaattggaggttacagttgaaccaactttacttccaaatacacatcctcttgcggcagtacaaaatgaatataacgctgtgtatgtgtacggtgaagcagttggggaaacgatgttttatggaccaggcgcaggaagtttaccaacagcgacagctgttgtttcggatttagttgctgtaatgcaaaatattagattaggggtaacaggaaatagtgctgtagtcccacaatatcaaaaagtattaaaagagccagacgaaattgtcgtgaaaaagtttttaagactgcatgtaaaagacgaaattggtgtatttgcaaaaattacttcattgttctctgagcgcggagttagctttgagaaaattattcaaatgccgcttgaagagaaaggaaaggctgaaattgtaattgtaacgcatcgtgcgtctcttgctgattatgattatattctacatacgttgcaagggtatgaagaaatagattgtttgaaagcgaactatcgaattgaaggggatgctaagtagtatctcttaccataaaacagaaagagcctattaagcagcttgcttaataggctcttttttatttaaaatctgcgtaccaacttgaataaatgcttggataatccagcctgttgtaaaggataagatgattgttccaaaatagataggtccatctaataaaaagcttaacgttaaaaataaaaaggctaatgaaatttctgttcttctaaacgtccattttttcttctcagcaaccgtcaaaacgaaagcttcttgaggcgccgcgcaaaggtttgtagagacgtaaagaccaatcccagctccaacgaatagatttccacaaataagtgttatatattttggaagagagcggatagcatccataatagttgtaatggaaccaatccaatcaacaaaaagcgaaataagaaccatcgttacaatggtaccgatcgtaatttgttttttattccaaaagagtacgataagagtaaaagcaaaattaatcatgaaaatccaaaaaccgatacttatcccgaaattttgatatagtgcaataaagaaggaatcataagggctaagtccaaaggaagtaattgtcgtcatcatattaataccgatggcgagagtgagtagaccgccaatgaaaaatatatattctaatttgaatcgaagcatagttgtatatcctttcaaaatgtatttgctaggaaaggatatattgtggaaagcttaccaggtcaagggataatttttgtgagaaggggaaaatgagatgacaaatataagaaagattgctgaacttgctggagtatctgtttcaactgtttcacgtgtactaaataatcatccgtacgtaaatgaacagaaacgaaaagaaattttagcaattatagaagaattaaattatacgcaaaatgtgaatgcaattcatttagtgaaaggaaaaacgaatgtcattggcgttttattaccgcacgtaaatgatcaatattatagcgccattatcgagggaatatcaaaggaaacagcaaaaaacaattataatatgatgctttgtcagacgaattatagtgaggaaagagaattagaaattttgaatatgttaaaaatgaaaaagcttgatggggttattatatgttccagggcaaatagtaaggaaaagcttgaagaatatacgaaatttggtccgattgttatgtgtgaagaaatagactcgaatttcatttcgagtgtgcatattgattactataaagtgttttcgcgcgggatgaagagcttaatagatgccggccatacaagtattgggtattgcattggaagaagcaatagcattaatagccagagaagaaaacaagcatatgaggatgcgcttcaaacgattgctgtaacaccgatagaggactggaagtttaaaggctgttttacggtggaggatgggcgtaatgtaattagggaatgggcccatatgtcagtaaaaccaacagcgtttcttgtatcttgcaaccatattgcagcgggaatggtaacggaagcgaaaaaacaagggattcgtattccagaagatattacgattatcggttgtgatgatcaagatgtggcagatattttaggcattacgacgatttcgtattgtagtaaaaatgttggtgtgaaggcattcgaattattatatgaaaagattaatgatgagaaaatagatgtaaagcacgtagagttattgccagaattagtacatagggaaacaacataatagataaggtgtgaaaatcgcttttcaaaattgcgtttggtataattatggacaatctatgagggctaaaaggggttttgatatgagatcaaaagtagtaaaagtaattctactcattacaattgcatctttctgtttatttgcatatggctttgtttcaggtgtaaatgatgtattaaatccgaaagcttcaaatttaattaaaaagaccgatgtagtggcaaaagagaaaaagaaaacgggaacgttacaaatcgttagtttaggtgattcattaacgcgtggcgttggtgataaagaaggaattggctatgttgggcgaatgaaagaggatttacaaaaagattataagcaaaaaattgcattaacaaatttagcagttagtggtgcaaaaatgcccgatttattaaaacaaattgaaagtaatggcgctcaatattcaattaagcaagcagatgtaatcgtgttaacgattggtgggaatgatttgttcccaggctgggaatcgcttgggaaaatagatttagagacgtatcgtcctgacacagaaacgtttcaaaatgaagcaaagaaaattatagaagaaattcgtaaattaaatacagatagtccgattttttggcttggtttatacaatccttttgaagatgtagaagatttaaaagggtcttcaaacattgttgtggactggaatgcatctttagagaagttagcgctaaacgataaaaatgtatatattacaccgacatttgatttattccaaaaccgcgggaaagatttattatactctgatcattttcatccgaacgaagtaggttatacgtatatggcagaacgtttagttcaaaatgttgtaagtaaattaaaattagaacaaggaggggtaaaatgacgacgatactttccgtacgagacttgaagaaggtaattggaaagaagactcttgtagagaatatttcctttgatgtaaagcaaggagaagtgttcgggttcttaggaccaaatggtgctggaaagacgactaccattcgaatgttagtcggattgattaaggcgacagaaggtacgatttctattggtggttattcgattaaggaaaatttcagagaagcgatgcgtcaaattgggagtatcgttgaaaacccagagttgtatacatatttaacgggatgggaaaatttaaagcaatttgctcgtatgttaggtgatatatcagatgaacgtattattgaaattgctgaaatggttcatttagatgaaagaattcatgacaaggtaaaaacgtactcacttggtatgaaacaacgccttggaattgcgcaggcgctccttgggaatccgaaattgctcatattagatgagccaacgaatggtttagatccagcagggattagagaacttagggaatttatacataagcttgtaaaagaagaaaatatgagcgtgtttatttcaagtcacttgctaagtgaagtgcaaatgatatgcgatcgcgttgctattattcataaaggaaaaatgataacagttgccaaggttgaagaattaattaaaacagcaagtgatcgtgtagaatggattgttacaccaatttctaaggcgaaagatatgctagaagcggccaaagaagtaagggaagtgagtgtagaaggcgatcgattactatgccgcatggatattgcatctataagtagttggaataaacactttgtcgaaaatgaaatagatgtacatagcgttaaggagcttgtatttacgctagaagatttatttattgaactcacaaggggtgagcagcatgcgtgaatttgcgaatctagttttaaatgaatcagaaaagatttaccgcaagaaacgtatttttgttgtcatgcttattttagcaatcttgatcccgctttttgtgtatgcgcagtatcgtgaaatagaaacgacacaaaaaagactcggtacaactgattggaaggtttcattgcaacagcaaattgttgattctcagaaccggttgaacaattctaggttgccagaagaatggcgtgattggttaaaggtaagagttgagcaacaacaatattatttagatcatgatattaatccgatggcaccgggtgcaccgacttttgtcagagcatttattgaacaaggaattacattatttattccgcttcttgtaatgattgtagccattgatatcgtttcaggagaacgaagtgatgggacgatgaagatgttacttacgcgaccaattcggcgttggaaaatactccttagtaaatacgtgacgatgttatttttcatttcgctcatactgtttcttgtaggtttgtttgcttacatattatcagggcttgtatttggatactcgggatggaatttacctgttttaacaggatttgttattgataaggaaacgctaaatacgaactttgtgcatcttattccgcagtggcaatacatcttaatggcgtatggactagcatggtttgttgctatcgttgtcggaactatatcatttatggtctctgttttaattcgtaatacaccagctggtatgggcgttatgctagctgcattaattgcaggcggtattttaagctcgttcgcaacatcttgggaaggcgccaaatatatttttagtgtgaatttatcattaacggattatttatcaggaaaattacctgcattacaaggtttatcgatgggattttctttgatgaatttaactgtttgggcagttgtttctcttgttatttcgttcgtagtatttacaagacaggatatggtgaattaattagacaggaagtgacagtatggaaaatgttttaaagaatgattgggagccactattggcaccagaattcgagaaagagtattatcttactctatccagttttttgacagaagaatacagcacgcatgttgtttatccgaaggtagaagatatttttaacgctcttcagtatacaagttatgaaaatacaaaggttgttattttaggacaagatccatatcatggaccgaatcaagcgcatggtttaagcttttctgtgcaacctggtgttaaaacaccaccgtcattgttaaatatgtataaagaacttcgagatgaatatggttatgaaatcccgaataacggttatttagtaaaatgggcggaacaaggagtattattactaaataccgtattaacagttcgtcaaggcgaagcaaattctcataagggaaaaggatgggagcactttacagatcgtgtaattgaactgttgaatgaacgtgaaaagccagttattttcatattgtgggggcgccatgcgcaggcgaagaagaagttaattacgaatccgaatcatcatattatcgaatctgtacatccaagcccattatcggcaagacgtggtttctttggtagtaagccatattctaaagtaaatacgattttagctaatatgggcgaaagagaaattgattgggaaattccaaatttataaatagaaaaggtagttaacagtcgttaactacctttttattattattgttgctcgttctttaattttgcatctagtacaaaagtgccaaatgggataactgatgaaacaaatgctccaagtgcccataaaattgatttacggtgtacgattgttacttgaattactgcaaagatgaatagaataaatagaacaccatgagccatgcctgtaattttaacagctgttgcaaatcctgcgaaatatttcaatggcattgctacaaataatagtaataggaaagaaataccctcaactagtccaattgctcttaatcgtccgattggtgtagataacataaagtagcctcctttaacgtatgcttgtatatagtaaatttgtattctttttcaaaataaaatagtctattttgtttcattatatacaaaaagaaagtttacactacgagaatagtgcaaagttcaaaatatagtcacaaaagcatgagaatttaaataaaaacctatttgaagtatttgacttcaaataggttttgtgaatgaaaatattaaacaagtacatccgtttttaaaacgaatttctctacaacttttgcaacaccatcgttcatatttgtatctgttacgtagtttgcaatttctttaatatcatcaggtgcattgcccattgcaacgccaagaccagcaaattcaatcatcgcttggtcgttatagctatcgcccattgcgataacttcttcacgcttaatgccaagcttttggatcagtttgtttaagctcgttccttttgtaacaccagcttcagtaaattctaagaagaatggtttcgaacgcatcacgcttaattggccttctagctgtttttgtagtttcttttcaacttcaacaaggcgttcagcttctttattcattaatacttttactacgggctctttaactgcagctttaaagtcatctactacaacaattggcataccagtaatatcgccctcaatttcagtataaggattattttcttccgttacgatatcatcgcccatataagtatgaatccatacatcttcagtttgactaatttcaaataggttgtgaacgatttcaggagatagtgtactactaaagatttcttcgtttgttttacagttaataatttttgcaccattaaaagataaaatgaaactgccgtattcttctaaacgaagttctttcgctacattgcgcataccgaacgttggacgtccagaagcaagtacaacctttacgccttgctcttgtgcagtcattaacgcttctttcgtacgaggtgaaatagtatggtcatcacgtaataaagtatcatctaaatctaaaacaatcattttataagtcatatagaaaattcctttctttaattgaaatcaaaatacatgttcatgaagagattgaggaataatagtaagacatcaaacctctttgaaaagaagtagataaattattatgagtgtgttgctcataatattggttaataatcattggggatgaataaaaccccaatgattaaagtttgattttatcgtaacaactctaaaggtagagtgcaataatggaagttttccaatttaagatatttgttttgctgtggaacgagaaaatagtatttctagcaagattgccattacagatccaagaacgagaccattacttaaaaacgatgctagaaatggtggaagtgtggaatatgctcctgctggaacaaacataactccgactcctgtaaagattgaaagaccggctactttaaataatcgttctttatcctggacagtttcgtattctcgaaaggcgaggccaatcatgcttgcgaatacaggataaatagcggcataaccaactgcaacagggattgctgcaaagaatgaagtaatctttggaaatatactaacgacaataataaagcttgatcctaatataaacgggagacgtttataaatattagtcgttgcaataaaacctgctgatccagaaatagcgacaggcccaatagctgaaaataggccgcctagcaattggttgattcctgttataatgccagcttgtttaaaacgatctgatgcagcgttttcttcatatttagagacaaccttttgtacaacgcgaatacttgctaacatatttgttagaagtaagagcgtaacgaaaatgaccgtaattaccatgttccattcaacacgaggcattccgaaaacaaataaggatggaaaacggattatgtctgtcactggtgttattggattagataatccgaagcatgcgaataatatccagccgcatacgatactgaaaagaacggaatattgtccaataataggtagcttcatgatgaaaaaggatagtaaaataacaatgagtgaaagaataaatacgttaggttgtacttctgtatgttttccatcaaggccaaacattccctttaagaaggagccactaagctgcgcgacaagaagaaataaatacgttccaatgactgtcggtgtaaaatagcgaacgagtttatcaataagtccaaaaacgctaagaataatacaaataataccacttaataagaaagcatattgaagaactttaagtgtctcattatttgatccaaatagtacgacacctaaacttgcgtaaagggagaaaattccccaccaaaggccagcaggaccttcttgaataggaagtttatgcccaaatatagcttgcaagagaccagcaaaacctagaacaaataatgttctttgtacaaatgcgatggcttcagcgccattaagaccataactagttgcgacactaattggtacaataaggcttccagctaaaataaatagtgcccattgtaaggcggaaagaaatgtcttcattatatcaacctctttcatagattccgtatctagtatatacgtattttatttccactggcaaagattgtaggtagagaaaagagttgaaacacagtatgaatgcacgtaagcaattatggatagcagttatatgtatgacttttgttgtaattctaggaacgataggatttatgacgattgaagagattagtttgtttcaagcattttggatgacaatgattactgtattgactgttggatacggagatgccgttcctgtaacgcaagcggggaaagtatttgcgcttcttattattcctgttggcgtaggtattgttacgtatgcaattggggtagtggcagctatgattattgaagggaatttatttcatgcagtacggaggaagaagatggataaacaaatagcgcagttgaaaaatcatattatagtatgtggttgcggtagagtggggcttcaagttgtacatgaattgcaagaaaagaatattccatttgtcgttgttgataaagatgaaagtatattggagcaggaaaagcttttatttgtacatggagatgcaacggaagatcaagtattacataatgccggaattttaaaagcagctggtttagttgctattgttgcaaatgatgccgaaaatgtatttattacattaacagcaagagggttaaacgatacgattaaaattgtggcgagatctgaaaagccagaaactgaagagaaattaaggcgtgctggtgcaaataaggttattaacccatctagtatggcgggtattcatatcgcaaaaggtattgcaaatccattaaccgttcattatattgatacagtgttgtatggagtagaacagtcatttgtcattgaagaaattctagttggaaaagattcaatattagttggtaaatcgttactagagagtaatgtaaggaatcagtttgatgtaacaatattagcgatttcaagaaatggtaatattatacataatccggcaggacaggaaaaattgaaagaacgtgatatgataatagtatttggttcagtagaaaaattggtacaattcgagaaagaattacaaagtacgaggtgataaggaatgcaaatatctagcgacaagattttaaataaaatggcgaatgaaattgcgaaggcaaaaagtagtgaaggacaaaagtcaaaagaacatttattagttgtgcgtgctttatgtgacttattattagatgaacaagttgaaacatctacatatagagaaccgaaaattcaatcgcaagtaattggatcacaaccagtaacaactatgcaaccaattgcacctgtttctggggagccagtatatataaaagaaagtgatgcaaacggtaattctttatttgatttttagaagataaatcgtttggcttatatgcaaaaattgcttatgataaaggtaaaaaaggggaattaagatgaaaattttctttttactaggttgtattgcagcggggctatctgttgcgttaggggcctttggagcacacggtttagaaaataaaatttctgcaaaaatgttagaagtttggaaaacaggcgttacatatcaaatgtttcatgcaggtggactattcgtagttgctttattgatggataaggttcaatcatcacttttaactactgctggttggctaatggtagctggaattattatgttctcaggtagtttgtatgcattaagtacgacaggcattaagttctttggtccaattacacctcttggtggtgtagcgtttattgtggcgtggattctagtagggactgcagttgtaaaaggattataaaaaacaaaagctggcatttgccagcttttttatggtcttggagcataagttgcttgttgacccggtaaatacgtaattctttctggaaattctacataatctaagtaaatcattagtaataagtaacgctttccggattcaggctcactaatgataatatgatcacgaccagctgcctcgataatacctgtataagattgagtaccaagagaactaccacgctcataagtcattacaactgtagcttgcttacctttgtttagacgaaggatattttcaatatatgattgttctagaggtaacatcccttgagaaattgcatattgcgcttgcgcagcttgttgctgcattgcttgttgttgctgttgctgttgcccagcggtcatttgttgcggttgtacataagttccagatggttgataaaaacctgttccataataggggttttgttgctgtgtcattcaaaaatccctcctcatttttattccttaatatacgctagggcagtctccagcagatggctggaagaagcagtgctttttaaagcgaccagagttttgttggttataccaagttggtggacatgccccttcaggtctaaagaaccataaggcaaagttggcaggccaaaaacgttgcccttgaatggtccgtctcgctagggcaatatcttgttcacgtgcccgttgataaaagtatcctttttgcgttgcttcaaaaccgccggggttttgataaaccatttgacgtaaattacgaatgcttttaaaatctaaacaatttccgcggacacgatttaccccaacgtttccgaccattaacattccttgttgcccttctccttcggcttcagcacgcatcagtctagccaacaactttacatcttcttcgttataagcaataacacccattatgtgtcacctctctttttggaataccttttggaaagaggtttatctctagatgaagtgtgtaacaattactagttcatacgtatgaggaaaagggctcagatatgacaaccaaacgaagttttacattgagagtggaaaataaaaaaagctagcgtgagccagcttttttattaaaaaactttagaccataagtttgagaagaaatcaccaatagagcgcattgttaacacaaaccaatttgctttttcaacttcctctgtcgtttttgcagtaactttcatacttttactaccgtctaagaaaccatatttatcagttgattctaaagtaattgagcctactttggcatctttcttaataggagcaactaaatgtccatcttcagcaagagatttatctaattcagtcccaattttataaggttctttgctaccttttttcgcaattactgttatttctttttcgggtgcaacagttacttggtcttctttcccttttactacagagattgtattgttcttattaacttttagtttttgtttttcaaagttattaaatccatattcgattaattcacgagattctgtgaaacgttcatccattgattttgttttaataataaccgagataagacgtacatcaccacgtttagcagtaatagtaaatccgtatccagctgtatcagaacttccggtttttaaaccatcggtaccttcataagcgaaagaagctcctggtaacatccaattccagttttccatacgaattggttttgggtgattgtctgggaagtttctaaatctttgttttgtatcctctagcatttctggatactttgtaatcattgcttttgaaagcatacccatatcacgagctgacatagagttttctgcatttggatcagtaccctcaggatgttttccttttaagtcagcgttatttaagccagtagcgtttacaaatttatatttctttaatcctagctttttagcatgttcatttgcaagatttaagaagtttttctcacttcctgcaagaagttctgctaaagcgatactagatccatttgctgagaatataacaatagaatgatataattcttttacagtatattgacgtcctttttcgaacggtacattagagaattcattattacgagagacttcataagcgtaatcagaaatatttactttcgtatcccatgtgatttttccttctttaattgcttctaaaacagcgtaaacaacaattaatttcgacatactagcaatagccagcaattcatctggattttgctcgtgaagtatttttccagtatctgcatcaaataaaagtgcagcggctgcctcaatatgtattttttcttccgcatgggatgttgttactcctaaggaagaaattgacaatacaagcaatagtaaaatagacaaaatttttttcatatagattatcaccttcgcatcgttatttagcatatagctcgtatcattttagcatatctttatatataaaaaggttacaattttacaataaatttgaaaaaatgtcggtttttcttcaaaagtgcagaaaaaaggagatttttgaggataaatatagagaagaataaaaaaaggaacgaatttcgttccttttcaccatttatatgtgtaaaaatttctctactttttcgtctggtaaaatgtttccaacgaagaatgttccaaattcaccataacgagcacttacttcatcgaagcgcatttcatatataagttttttaaattgaagaacatcgtcagcgaataatgttacgccccattcgaaatcgtcgaatccaacagatcctgaaatcacttggcgtactttacctgcgtattgacggccaattttactatgactgtacatcatttttttacgctcttccataggaagcatgtaccagttgtcatcaccttggcgacgcttatccattggatagaagcaaatatgatttgctttcggcaattcaggatataagcgagctaaaatttgcgggttttggtatggatcctcatcagctggaagatagttgcttaattcaacaacagatacgtaagaatatgcaggaaccatatattcagctaaagttgttttattcaattctgtctcaatttcatttaactcttccattgttggacgtaaaatcataagcataatatcagctttttggccaacaactgtatacattgcgtgactaccttttttcgcagtagctacttcgttccatttttcaacgacatttaaaaattcagacactgcttgtccgcgttcgtcgctagataatgttttccatgcagcccaatcaatagaacgtaaatcatgtaaacaataccagccatctaacgttgttgttgcttcactcattctattcacctcagttaatgatagttttacacgttaactatagcatatatagttttaaaatcatctatataaaaccttggcgcataaaattgtcacatttaagtgtttaagcaaggtgaatttaacggctgaattttatgaaaatataatcatttttattttatctattttttgggagctataagtttaaaatatagaagaaaagcagtattcttaaagatagagtttttttaacatatgtaggagggtttattcgtgagcaacttatttacaacagtaaaagaaaaagttcaaggaaaaggcatttctatcgtacttcctgaaggaactgatgaaagaattttaggcgctgcagagcgtttagcaaaagaagagttagtaaaaccaatcttagttggtaatagagaagaaattagcgcaaaagctgctagcatgaatttaacattagcaggcgttgatatttacgacccagctacatacgaagaaatggatgcgatggtagcatctttcgttgaacgccgtaaaggtaaagcaactgaagaagacgctcgcaaaatccttaaagacgaaaactacttcggtacaatgcttgtatacatgggcaaagcacacggtctagtaagtggtgcagctcactctacagctgatacagttcgtccagcacttcaaattattaaaacaaaaccaggtgttacaaaaacttctggcgtattcatcatggtacgtgaagaagagaaatatgtattcgctgattgcgcaattaacattgcaccaaacagccaagatttagctgaaatcggtatcgaaagtgcgaaaactgctgagttattcggcattgatccacgcgttgctatgttaagcttctctacaaaaggttctgcgaaatctccagaaacagaaaaagttgtagaagcaactcgcattgcaaaagaaatggctcctgagttaactttagatggagaattccaattcgatgctgcattcgtaccatctgtagctgagaaaaaagctccaggttctacaattaaaggtgatgctaacgtattcgtattcccaagcttagaagctggtaatatcggctacaaaatcgctcaacgtttaggtaacttcgaagcagtaggaccaatcttgcaaggcttaaacatgcctgtaaatgacctatctcgtggatgtaacgaagaagaagtgtacaagttagcattaattacagcagctcaagcactttaattctataatgaattgaaataaagaccgtcgctattatagcgacggtctttatttttctaaaccaagtgctttattattacgatcaataatacgttgtaaattcatctcatataaaggaatctcatctattgttaattgagatggtgttaactttggagcgaattgctgcaatgtttttaaaagacgcatcattaaatcttgtactgtaatggtttcaccaagtaattctgagagtgaggccatcgtacttggtacaatttcagggtacgtaaagcgtgtttcttccccttgaattgctaggttgtagaaatcacgaacgagtgcggcacgctcagagccacttccggtagcgcagagatagatttggacagcgacacctccgcgaatacgacgttgtgaaataccagcaaatttttgatcgcgaatacttaagtcataactaccaggacagtaagagccgacaatttcttttgcctcgatagtaacgtcgtaatcctttaacatctccttaatcaaatgccacattgtatcgtatccaaggtcaatatcgatacctttttctgtttcttggaataaaagtgatacgtttaaaacaccttcatcaagcacgaccgcaagcccgccagaattacggacaataacattgaagttgttttgttttaaaaaagaaataccttcttctaaatgcggaaggcgtgaatcttgaatgccaaggacaattgtattgtgatgaacccaagaacgcattgttgcggctgacttgccatttccaatgcttgtgcataatgtgtcatccattgcgaatgactgaagtgcatggaatgttggtcccaaactggattgatctacaatgcgccactctggctgagataaaatggaacgggaattgctcatataactaaccccttatctttaaaatgacaatctctattatagcaaaaaatgaaggatggagttttctcacatataaagggggagcttagaggtgaaataataaaaaggatgcattacatgcatcctttttattctgcaattttttctaaattaccgtttcggtccattcggaaagatgtttgagaacgttcttcgtcatccatgactgccaatttacgagctcggttcataatgttcataagtgtttcgtaatcttcttgtacagtatgagattgcttttctaatttttctagtttcttttctagttcctcattccgaaggatttgtgctttaatttcttgtttcaatctcgtattctcgttttcaagagctgtcacttttatatttgaagatccgactgtttgtaaaaaataaataacatcttgcattgtcatagagcttcttgcagcaggagcagtagattcttgatatggaatagcttctttatattgtacgattgattcttcttgtactaattcttcataatcagttatcgaatctgaagctggtggtgtataaagtaaacgttttttcgcttgttcaccgcttgcagcacgcattttatctttacgatgtttttttgctagttgaagagcttgttcatagctatagcgaacaacagcattccagcggaaaccacaagcagcagatgtacgatttaactgatcccctacttcctcaaatgcatttaattgcgtacttccttctctaacatgacgaagtaccgtttcagcaagtaataaatcatcctcatctgtccaagcatcttgtcttactttcatagattcaactccctttctttttatgaacttcctatttttataatgggcaaaaaaataaacttttatacaaagcttttaaaaatatggtagatttcgatgaaaggtaaaaattttcccatgaatggtgagcgcttctgtaggagagcatataaatatgtagcattatgtagagaataggctttgtagggaaacttgcaacgagcttcaaagagcggtaaaataccatttagtgtttatttttaaacgtacttgagaaaagtttaaaatagaggaagtgttatataatgggaaacgagtttcgcgtgtgcgatgactgtcaggcaacgaacgttaaaacgttagttccgaagttaaaaaaagtagattcatgtgcaacgattgaagttggatgtcagtcttactgtggtcctggtcgtaaaaaatcattcgcatttgtaaataaccgtccagttgcggctccaacagaagatgagttaatcgcaaaaattgaagcaaagttaaataagtaagaaaaagaagagtgaaaagattactcttcttttttatgcccataagaggaataatttattctgcgaaagtactcttgtatggacgaacgttttctaaaggatagacacaacttttgtattaaaattccaatttgtataaatttatatttcaaaataatggttgacagtcttttaaagcgataggtagaatagaagtgtctgattctgagaatcattatcaggaaaataacaattcacctaatttttttattactatttgagaataaatttcatttcaataaatatatgttgttagttaggatggttgagggatggaagcgagcgcaagcagtatagaacagcaagaagagaatgttaaagagattaagagcagaccgcttatcgcttctattattttagtagcgggtacagttttgttagctttaagcatggcagtttctatttcttttggggctgcagatattagtttaaagactgtatggcaagctgtatttcggtttgatggatctattacacatcataatgtaattcaagagcttcgcatgcctagagcaatagggggcgtagttgcaggtgcctttttagcggtatcaggagcaattatgcaaggtatgacgcgaaatccacttgcttcgccatcgttaatggggattacagatggggctgtatttggaattgcaattatgtatgcattttttcctaattcaccttatttaatgtttgttatcgcatcttttattggagctgcgtttggtgcaagcattgtatatggaattgggtcttcttcaccaggtggattaacacctgtgaaattagctttagcaggtgcagctattagtgctttattaggggcgatttcatctggaatcgcattgtatttcaatcttgcccaagaggtaagcatgtggaatgcaggcggagttgctggagtgaaatggcaaagtattaatatgttagtgccaattggccttgtttgtctttttatcgcaattatgatgtcgagatatattacaattttgagcttcggtgaagaaattgcaattggacttggtcaaaatacgacattaattaaatttatcggaacagtacttgttcttgttttaacgggttccgcagtttccatggcaggatcagttggatttgttggtcttgtaattccgcatatgactcgttttcttgtaggctcggactatagatgggttattccatgttctgcggtcttaggcgggctgttaattgaatgtgcagatatgttatctcgcgttattaacccgccatttgaaacgccaattggagcaattacagcgctaattggggttccattcttcctctacttagcacgtaatgaagggagaggaaagatgtgaggacgagtgtcttaacaaaaaagaacatttctatattaacgattttagtaggactaatcgtttctatatttcttattagtttaaatacaggaacttttaaaatcccgccaatggacgtattaaagtcattggttggactaggggctgaagatcagtctgttattttatttgaattccgcatgccgcgtatggtaattgctatactagtcggatctgctttagctatgtcaggtgcgattttgcaaggtttatcacgaaatccgcttgctgatccaggtattataggtattaatgctggagcgggattaacagttgttatattcgtctacttcttcttcgggaaagtagggactggtacatttttatctgtattcattcttccattcttcgcactagttggagcgatattagcagcggtaattatttatttactagcatggaaagacggcgtttcatcgactcgattaatacttgttggtattgccgttgcagctggatttggagctgttagtttaattttctctatgaagatgacatctaacgattttcgttttgctacgatttggctggcgggaagtctatggggtacagattggaaattcgtattaagtgtacttccatggatggttattttcttaccgcttgctataagtaaagcacacatattaaatgtaatgaacctaggcgattctacagcagttggccttggtgtaaacgtagaaaaagaaagacgtaaattattatttattgcagtttgtttagcaggtgcatctgttgctgttgccggtggaattggctttatcggtttaatggccccgcatttagcaaggcgccttgttggtggtaaacatcaaattatgttgcccaccgctgcgctaataggaacgtttttacttttattcgcagacgtaatttcaagaagtgtattaacaacttcagaaataccagtcggtcttgttatttctgtaattggtgcaccatatttcatttatttacttatgaggacaaaataaagggaggcttttcgtatggcaactttagcggtggatgcggtatctgttggctataatgaaggtttaattattgatggtttaacagttgaaattccggaagggaaaattacaacaattattggaccaaatggttgtgggaagtccacattattaaaaacggcgtctcgtattttgaaggcaaagcaaggtactgtttatcttgacggaaaagcaattgagaaacagccaacgaaagaaattgcaaagaaaatggcgattttaccacaaactgcagaagtgccaacgggtcttactgtatttgagcttgtgtcatatggaagattccctcatcaaaaagggtttggcacgttgaaagaagaggattatcgctacattaactgggcacttgaagtgacaggaatgaaagaatttgcgaatcgtccagcagaagcgctatcaggtggccaacgtcaacgtgtttggattgcaatggctcttgcacaaggaacagaattacttgtattggatgaaccaacaacgtacttagatatggctcatcaattagaagtattaaacttattgaaaaagttaaatgaagaagaaggtagaacgattgttatggttatccatgacttaaaccacgcttctcgtttctctgatcatatgattgcattaaaagcaggtaagttaatgaaacaaggaacgccagatgaagttatgacaagtgaaacacttcgtaacgtatttgagattgaagctcaaatcgttccatgtccagtaaactgtaagccaatttgtttaacatatgatttagcgatgattagtaatcaattgcgtaaaaaagcataagtagaaccccctcgtaaagaggggggcttctaatggacgttgagcttcttatatatgaatgggaagttgaacgcccgttagaatgggttattaacaacaattaataaatatatattaattaattgttatattcgtttcttatagttcattgtaacttataagataaatacagctagaaggagtgggaacatgaagaattttaaaatggcactattagcaatggtactagttgtgacttctgtactatttgcagcttgttctaataaagaagaagaaaagaaagcagatgcaaagactgaagagcgcactgtaaaacatgcaaaaggggaaattaaaattcctgcaaacccaaagaaaattgctgaccttagtggttcaacagaagaattattaattttcggtatgaaaccggttattactgctaatacatctcaagaaaaaattgatgcacatattgaaaagaaactaaaagacgttaaaccagttggttctgcttggggcgataaaattaacattgaagcagtagctgttgcaaaaccagatttaattcttgtaaataatcgtcaagaaaagatttatgatcaattatctaaaattgcaccaacagttatgttaaacactccattagatcaatggcgtccaaaattcgaagaagtaggtcaaatcttcggtaaagaaaaagaaacaaaagaatggttcaaaaagtatgatgaaaaagcaagcaaattacatgacaaaatcgtcgctaaaactggtgaagcaacatttatgaaaatggctgcatatccaaatgctttccgcgtatatggtgattacggttacggtagcgtaatctttaatgatttaaaactaccagcagttaaaggtacaccaactgataaaccgttagtacaagtacaaaaagaagctttaatcgattacaacccagattacttattcgtatttacaactggtgacggttctcagcgcttaaaagaattccaagaagaatcaatttggaaaaacatgaacgctgttaaaaataaccacgtatttacaattaaaaatgaagacttaaacaaaggttacttcccactagggaaagatatgatcttagacgaagttgctgaattcgttttaggtaaataatgtataaaggaaatcacttttacttcggtaaaggtgattttttctttttataaagggaattaatacagtctttcatttctttctgtttctcatttcgtttataatataaagtaagaatgtagtaaagaaagggggatgtcggaaagtggtatatttaaacgacaaactcagcgaaacaaaagtgtttaaagacccagtacataaatatgtgcacgtgcgtgatcgtgttatttgggatttaatcggaacgaaagaatttcaacgcttgcgccgtattaagcagcttggaacgacattttttacatttcacggtgcagagcatagtcgctttactcattcgttaggtgtatacgaaattattcgtcgtatgattgatgatgtgtttgatggcagaccaaattggaatgctgaagatagattgttatgtttatgtgcggcattacttcatgatgtcggtcacggcccattttctcactcgtttgaaaaagtattttcattagatcatgagaaatttacgcaaaagattatcgtaggcgatacggagattaatgatgtattaagtcgtgttgataaggagtttccgcaaaaggtagcagatgtaattgcaaaaacatctactaataaattagcgattagtatgatttcgagccaaattgatgcggatcgtatggattatttattaagagatgcttattttacaggcgtaaagtacggaaacttcgatatggaacgtatactgcgtgtaatgcgtccgtatgggaatcaagtagtcattaaaaatagtggtatgcatgctgttgagcattacattatgagtcgttatcaaatgtattggcaagtatatttccacccggtaacgcgaagtgcagaagttattttaacgaagattttacaccgtgcgaaatcactgcacgagaagtattatacatttaaaaatcatcctgttcatttctattctttatttgaagaagaagtaacagtagaggattatttaaagttagacgagaacgttatgtattactacttccaagtatggcaggaagaagaagattcaattttaagcgatttatgccgccgttttatgaatcgaaatctatttaaatatgtagagtttacagataaacacggtttagataattggatggaattaagtagtttatttaaaaagattggacttgatccggagtattatttagtagttgattcaacatcagacttaccgtatgacttttatcgtgcaggagaagaagaagagcgtctaccaatcctacttcttatgccaaacggagagcttagagagctttcacgtgagtcggacattgttgaggcgattacaggtaagaaaagaacggatcaaaagctattctatccacatgatttaatctatgaagatggaagaaaaggaaaatataaagagagaattattgagttgttagaaggaaagaaataagaagcagctaatggctgcttcttatgaaaaaacttgaaattatttgtcacttaagcgttttccgccaactgcataatggtttttagacatttcttcgatgaaaacaacgatgttttcttcaggagcaccagttgtttcgcttactgctgctgttactttctcagcaagagctttcttttgttcttctgtgcgtccttctagcattttcactgttacgtatggcatgtacaatcgctccttttatgtaagttacactcttattatagcggattatggggaagaacaatcgaaaaaacaaataatttctttttttgacatatggaagaggagatgaagcatggatcagttatttagatacccgttgcaccaaattcctttggtagcaatggccattattatcgcattatcagttcatgaatttgcacatgcatatgtagcatataaatttggagacgatacagcaaagagacaaggccgtttaacgttatcaccgatggcacacttagatcctataggtttgattgcagtattaattcttggattcggttgggcaagaccggttcctgttaacccatataactttaaaagaccgcgtcttgcaggtatattagtttcaattgcagggccgattagtaacttaattttaagcgcaattggtttaattatttggtatagcttagtaaaatttggtgtattatactcaattccatctgcagtagcagatacgttagctcaatttttccagatttttattatgctgaatatcgttttacttgtatttaacttattaccgatcccgccacttgatgggtatcgagttgtggaagatttagcgccagcaaatattcgcgcgaaaatgacacagtatgaaaaatacggggcaattgcgttattaattctcgttattacaccgcttagtaattacacaattcaacctattttccaggtagttattccgcatgtatttgtatttttagatagcattattgcgcctatttttggccttttataatttttaagtgaggaggattttacatatgacagagaaaaagaaaaaaatcggttttaatatcgtgaaaaatgattcaacagatggacatggtggatttggtgttggggcattaagcttagaaaacatttcacctgtatttgttgatgtactagagaaaactgcattcgttgatattggtgcgatgcacgcgcgtagtacagtagaaaaaggtattaagtttttaacaaataaagatgaagttccaaacggaaaaccattttggcttgtttgggtaacaattgaaagaactgcgacaggtgcgtattatgcaggtgtaacagcttgtgaaatgacagttgaccgtgagattcgccgcggatataaatcacttccagagcacgtaaataaaatggataaatcattgaagcgtcacattatggttgaccatatggatgaatcatctaaaaaggtacttggtacgttcttgaaagaacataatgaagcgatttggaacgaatctagtgaagaattacgccgtgcattattaagtgaataaaaatagctgacggatgcccgtcagctatttttttaccaaggaagatattttttccaccaacttgtttttttcttttcttcagtcgttttttcaaattcttctttatcatcgacgtgatccatacaatattcagtcggttcggtacctttagcgaaatacattttcacagaaataggacaattttttgtagcaattttaccgttctctggattgatattaaccgctacgacgtcacttggttgtttaaattctttttttggttgtccctctaaccctttctccatcgtatcagtccatattttcttcgcatatccttgttctgctacgtttgaaatagatttaggttgatcatatccgacccacacaccagttacgatttgcggagtaaatccgatcatccaactatccgtttcagtagaaccagatttgccggcatatgttcttgatagtttggataacatcgattgaccagttacagcagcatagctgcttagtttcttattaaacataccagtcatcatttcttccattacaaacgctttgctcttgtcgagaacttgtttactctctaaatgagcatcgtataatatatttccttcatgatccataatgcggcgaatgaaagtaggttttacttcttttccaccatttgcgaacatgctataagcgttaaccatttcaattggttttactggtgatgtaccaagagctagagaaggcacatcttttaatgcacttttaattccaaattgtttcgctgtttttgcaagcgcgtcatcgcctaaaaacaaattcgttttcacagcataaatgttatcagagactgcgagagcttgtgccattgttacgaaatcatctgcataataatctttatagttcttcggtttatactttgaaacgccgtcacctaaagtgaatacagtatattcgctttttaagcgcgtagcaggcgtgaatcctcgttctaatgccgcataatatagaaatggcttaaatgtagaaccaggctgacgaatggcttgtgtagccctgttaaattgactcgtagtataatcagttccaccaacaagagcagccacttcacctgtctttggattcatagagacgagagcagtttgtatgtttgttgtgtcaggtatgtgatcttttacagcttgttctgctacagcttgtagtttagggtctagcgttgtataaattcgcaagccaccccgttgtaaagcttgttcgtctaatccaacatcacgaaggagcgaagcttgtacagcatcttggaaatatggtgcgacctctgctacttttttcgtatctaatgaggcaaaagttagtggctctttcttcgctaaggctgcttgttgcttcgtaatatatccttgttctaccatttcatctaatatgagagcttgtcgtcctttcgcacgatcctctttcaaaaagggagaatagacacttggccctttcgggatacctgcgagcatactagcttctgctaatgttaactcttttgccgttttatcgaaatatagacgggatgcagcttcgatgccataagcgccatgtccgtaataaattgtatttaaatatccttctaaaatatgatttttattataattcacctcaaggcgaattgtgtacattgcttctaatagtttacgtttccacgttttatcatgatctaagtaaaggttacgagcatactgttgtgtaatcgtactagcaccttggacttttgccatcgcttttaaatcggcaacaatggcaccagcaatacgtttcatatcaaagccatgatgtttgtagaatcgttgatcttcaatagatagtgtcgcctcttttacataaggtgaaatttcattaagagatacattgtaacgtttttgcatttcattactttgtcctataacagtgtcatcatttgcgtaaaagacgcttgtttgcgggaccgcaacaggaggaggtcccataatttttgcaactataataataacaaaaaaagaaaaaacgaagaaaaggacgcaagaaaacattgcggtgaagaaaagacgtttatattttttaagttttggattcatagtttgatccatcttttttcagcccctcattaatacaagcgttattgtattagtattgagggttttcatttattttaaacaatgaaatttcgaaaataaaaaagccccttccattaagaaaggagctcaaaggcacgtgctggccaatcagtaatgatgacatctacaccataatcaatcatagtttgtaaatctttgtattcattaattgtatatggacggaaaacatacccttgctcttgtgctaactgcacaaattctttcgttaataactggaagtttggatgtaatccatttgcttctctatgttttgcttcggcaattggatcagaaagtggtgtatcatataaaattgctcttgggatttcaggagcaatttctgctaataatgaaacagagtcatggttaaatgatgaaaatacaatttgattagaaagatgatattcacgcacaagtgcaacagctttttcctcaatctttgggtaatgaataacatctgtctttaattcaatatttagttgtaagttcgttgtggaaagccaaatgaaaacctcacgcaacgttgggatttttgcttcatggaaagaagggtctttatagctaccagcgtccaatgattgtagttcctctaccgttttttccgaaacaagtccaacgccatttgttgtacgatcgacggtttcatcgtgaattacgacaagttcaccatcttttgataagtggacatcgagttcaattccgtgagcgccaatgcgttctgcttcttggaaggcaatcatcgtattttcgggatgtgttccttttactccgcggtgagcgaaaataagtggtttactcatgtgaaattctccttattatctcttttctttcattatgaaactgctttagggaaaatacaattgaatatgacaaacatttacaaaagtctaacagttgcacaaaagttaacgttaacgtaaaatgtaataatcaagtgaagggaggaataaacatgtataaaattgatgaagtaacaaagcaagttggtttgacaaaacgtacacttcgttattatgaggaaattggtttaattcatccccctgaacgtagtgaggggaacattcgcctgtatacagacggggatatcgccagaattaaaaaaattgtggaagcgaaagaagtgttaggaattacgcttcaagagatgcagcattttttatcgttaaaagaaagaatggagcaaagaagaaatagcgaaaaccctcgtgatcgtgaagtgattcaagaaattaaagatatgcttgaaaaacaagtggaaacgctagacgaaaaaatggagcaaatgcaacgtgtaaaggcagaactagaagatagtttacatcgtgcagtaacatttttagagaacacaaaaggagagtaatcaaaatggagagcaaacaaaaactagggagattgattacagtggtggctaccttccttgccttttcgggtataggggtagttgacccaattttgccaattattgctgagaaaatcggtgcaacgcattggcaagttgaaatgttatttaccgcttatattttaacgatggcaatcatgatgttaccagctggaatattcgcatcgagatttggtgataaacgaatgatgacgattggtcttgcgatcgtgactgtatttgcgtttatatgcggtatatcgcaaacgattgctcaattatctcttttccgcgcaggatggggattaggaaatgcgatgttcttcgcaacggcgatgacattattgattgcattaagtaaagaagttcatgaagcagtaggattgtatgaagcagctatcggtttagggatggcaggcggaccgttattaggcgggatattaggtggacattcttggcgttacccattttttgcgacgagtattttaatcttcttagcatttattttagtattcttttttgtaaaagaaccggagcgaaaagtgaagcgtaaggctgctggggtaggagaattacttaacctggtgaagtataaaccgtttatgcaaggtgcgatttcaggaatgttatactactacggatttttcgttgtgttagcatattcaccacttattatgcatttatcagctattcaattaggctttgtattttgcggatgggggcttgcgttagcttacggttctgcaattttagcacataagctagaagggaaatatgaaccaaaaacattattaaagggtagtttactcgtatttgcgattttcttaattgcactattctttgtgaaaattatgtggttacaaattactcttatcgttttatcaggattggcatctggcttaaacaatgcattatatacaagttatgtaatggatatttcaccttatgaaagatctgttacgtcaggtgtttataactttgttcgttggttaggtggtgcgattgctccaattttatcaggaattatcggtcatactgtttcaccacaaagtccgtttttagtaggtggaattgttgtgttagttggttgtattatgatcctaattccaattcgtaaaccagtagaaatagagacaaaagccctttcttaagaaagggttttctttccttttgcggtgcaaaccctttccgcacatatgttagaaccctctgactaaaatatattttcggtatttttgtacttttaactatacattttggatgttttgttttatttttgttaggggacattaatgatgtccctattataaatttgcattgaaaggcgtgattgtacgatggaactatggttcactgaaaaacaaacaaaacattttgggattacggcgcgtattaaccgcacattacatacggagcaaacagaattccaaaaacttgatatggtcgaaacggaagagttcggaaacatgcttattttagatggcatggttatgacaacagaaaaagatgagttcgtttatcacgaaatggtagcacacgtacctttatttacacatccaaaccctgaaaacgtattagttgttggtggcggtgatggtggtgttattcgtgaagtgttaaaacacccaagtgtaaagaaagcaactcttgttgaaatcgatggaaaagtaattgagtactctaaacaatacttaccatcaattgcaggcgcattagataatgagcgtgtagaagtaaaagtaggagacggtttcctacatatcgcagaaagcgaaaatgaatacgatgtaattatggtagattctactgagccagtaggaccagcagtaaacctatttacaaaaggcttctacgctggaatttcaaaagcgttaaaagaagatggtattttcgttgcacaaacggacaacccttggtttacaccagaactaattacaactgtgtttaaagacgtaaaagagatcttcccaattactcgtttgtacacagcaaacattccaacttacccaagtggtctttggacgttcacaattggatctaaaaaacatgatccattagaagtaagtgaagagcgtttccacgaaatcgaaacgaaatactacacaaaagaattacacaatgcagcattcgcattaccgaaatttgttggggatttaattaagtaagagaattgtatcaaacaaataaagtgtaagtagctcatttaaggtgtttgtccagaagacttgaacatgctagctacttacacttctgtagagaaaatcgtcttcttgttgttaaaaagaagacccggtaaatcgagaaagaggagcaattcgctccaaatttgagaaatagtgaaaggttgggataccttaagttccacataaggaggaaaagaatatgcgttttgatgaagcttattcaggtaaagtatttattaaaagtcatccaagttttgaagagtcaaaggtagttatttatgggatgcctatggattggacagtaagttaccgtccgggatctcgttttggccctgcacgtattcgtgaagtatcaatcggtcttgaagaatatagcccgtatttagatcgtgaactagaagaggtaaaatattttgatgcgggtgatatcccattaccattcggaaatgcacaacgcagcttagacatgattgaagagtatgtatcaaaacttttagatgccgataagtttccactaggtctcggcggtgagcacctagtgtcttggccaatttttaaggcaatggcaaaaaaatatccggatttagcaatcatccacatggatgctcatactgatttacgtgaatcgtatgaaggggagcctttatcccactctacaccaattcgtaaagtgtgtgatttaattggtccggaaaacgtatattctttcggaattcgttctggaatgaaggaagaatttgaatgggcgaaagaagtaggtatgaacttatacaaatttgacgtattagaaccgttaaaagaagtattaccgaaacttgctggccgcccagtctatgtcacaatcgacattgatgtattagacccagctcacgctccaggaacaggaacattagaagctggcggtatcacatctaaagaattattagattccatcgtagcaattgcaaattcaaatataaatgtagttggagcagacttagtagaagtagctccagtctacgaccatagtgatcaaacaccagtcgcagcaagcaaattcgtgcgggaaatgctgctcggttgggtgaaataaaagcggaagcggctcgctcagaatgtgagggggatggagtttcagacgtagaggcgctttttgcctcgaaggaagaagcgaagccaccgatcattctagccgctgcagctagataaagtaagagccctctatatgattagagggctcttattttgtcgttatgtgtcggtaagtcgatatattaaaaaaatcgctgatataattcgagttgcgccgatatattaaaaaaatcgccgatataattcgagttgcgctgatatattaaaaaaaccgccgatataatttcatttaccgttacgcaacacaaaaaaaagctattctcaaacgatgggaatagctctttttcttatgcaaccttctcttccgaagtaactccgcgaatttcatcagcagagcggattggatatttacggaacacaatagatccgatgtatccgacaatagtggtaacgattccacataatatagcagcaattgttacttttacaacgtcattaaatccgaataggacaagaagtcctgggattggtgatgctgttcctggtgcattattaacaagttggaatagcgatgtaataataccggcaagtgcaccgccaacgaaatttgtcatatagataggaattggatttgctgagacaatatcggcttgtgttaaaggctcgattgctacagcaattgtatctttctttgaacaaatttttaatcgtttaaagaaaataaagttcatcggggctgaggcggcaacggcaagactaccaatcgccattggtaaacctgttaatccaagcattgcagttagtgccatagaacttagtggagaggtagaaataactgttattaatccaccaagcataatacccataatgataggactttctgtagttgcaactgaaatcatagaaccgattttaccgagtgttgcgttaacaagcggatccataagcattgccattccgcgtgagattggtgcagcgataaataggattgctaaaaattccacgccagctggtaatttcttttcgagaaatttcacgacgaaagcacaaacgtatccagcgaaaaatcctggtaaaataccgaatccactagtagcaataccaattaaaacagcgtatacgggggaaacaccgattgctaatgcgactaaaatcgctgctgcgacaccgctcatactaccggaagcttctcctactgattgtaaaaagtcattatgaaacatttctccacctatataacggtgaaatgcttcaataagaaaacttgcgattgctgcattagctaaagcacccatcgccttcattccataaggcgcacggtaactaaaaagtgtaaatagacaaagtacaacaagtaatagtgctaaaccttgcaagatagccatttgaaaactgtctcctttgatttttgtaataaaaattcgtatcattcaataataatataaaagtgtatgaaacggaaaaattttttcttgggaacttgctgtaagaaaaaatcccttacaataatgtaaggaaagtgtaagacttttagatagagtatagtatgctcttttccgtataatacaagtatagatataatactagtgagaaagaagtgcaaacaggaggttcatgtatgaaattggtaattaaagttttagctatattcgccattattctaggtggaacagcgtattatttgaacacaaaaacagaaggtgtacatgcttttgtagacaacttcttttcaaataaagaaatacaagattattatgcggttatagataaaggtgagaaaaaagacggagaatacttgtatacttttaaagggtatacagaagacggaaagttacagatcattaaaagaatgatgaaccgtgaattgcatacgggggcgtttataaaaatttatgcaaaaggtatgcaaggaaaaggatgggctgaaatcccgaaagaatctattccacaaaaagcgttggaaaaaatagaaaaaccataaaaggagcgactcattcgctcctttttagtgcgttaaaatagtgatagatgttttttccttgttagaaataatttttgcacgtccaccaattgggaaagtgaaaatcggggttgtatgcccgaaacttgcgtttgcaatgataggaatatgtgcaagttcaggttttgaagcaatcatttcttgaatgtcttctatcgtacattctgcacctttttgcatctttcctataatgattccctttatgtattcaaaatcttgctgctgcataagggaatgtaaataacgatcaaaagttttaagagtagatgttccagttaaactatcttcttcaataaataaaattttgtcctttaaatttggcatatatggtgtgccttgcagtaagttaaatgtgctcatattgccaccgataatatctcccgtagcttctccttcctgaattgaaacgtatccttcatttttaataaattctcgattttcctgatctatataccaagaatcatcgctccatgtttcagatggcaggacttcaataggctcattagaagttaagcactttaaaaagtaatcggttgtatactcgagccctttctccattccaaaggaagagaaatggggtcctgaatatgtaacgagacctgtttttgcgtaaattgcattatttaaagcagtaatatctgaataaccacagaaaaatttcgggtttttatgaattagatcataatcgagatgtttcaataaaccattggagttgtatccgccaagtgtcgtcaaaatagcttttacattagggtctccaaatgctttatggaggtcttgaatgcgggaagaaatagaagaggaagcaaatcgatctatctcatcggcatattttgagaatgtaacttgaaagcccatgtcggttaatctctttatagcaagttttctattttcatttgaaacaatacttaaactacacgatggtgaaatcactcgtatttcatcacccttttttaactttgttggtatcactatattcacctctttaattgaaagaatatttagatttaaaaaatattttatcgtatgaaataaagtagaagtgaattattttttgaaatggagttttcctgatttttcagcagacagacagagtctttttttgatatgataggaaaagtgatttattataagtagtatttaatatctataacatttgaaaggtgtgcaagacgtggagaaacaacttgcaggcttgccggtacacgttcatttcgtaacagaaatccgtgaaggggcgaggaaggaaaccgttgcttttgaagcaaatggtcaatactatgtaaaaggtcaaggtacatatgtaacattccaggagccgaacgaacaaggcgaagtgaaaacaattattaaaattcaagatgaacaagttctcattatgcgttcaggtgctgtttctatgcgtcagacgcatgtgaaaggtgaatggacaactggtacgtatacgagtgaacttggtacgtttgcattgcaaacaaagactgataacgttctttttaaatggtcggatgaaaagaaaaaaggacaactcttcttaacttacgcattgcttctaagtgaacaagaagctggcagatatactattacaattaatttgaaggaggcaaaataatgaattccttagaacaagtaaaaggattgattaaagaagaaattcaggctgctgtattaaaggcagaattagcgacagaagaacagattccaaacgttgtattagaatctccaaaagataaaacaaatggtgacttctctacaaatatggcaatgcaacttgcacgcgttgcgaaaaaagcacctcgtatgattgcagaagaactagttgcaaacttcgataaagcaaaagcttctattgaaaaaatcgaaatcgctggtcctggttttattaacttctatatggataatagctacttaacagatttaattccaacaatcgtaaacgctggtgaagcttacggtgaaacgaatactggtaaaggtgaaaaagtacaagttgagttcgtatctgctaatccaacaggtgaccttcacttaggacatgcacgtggtgcggcagtaggtgacactttatgtaacctattagcaaaagcaggctacgatgtatctcgtgagtactacattaatgatgctggtaaccaaattcataacttagctctttctgttgaagctcgttacatgcaagctttaggcttagataaagaaatgccagaagacggttaccatggtgcggatatcattggaattggtaaacgtttagcagaagaattcggcgatcgttatgcgaaagctgatgaaaaagaaagctatgaattctaccgtgagtacggtttaaaatatgaattagcaaaacttcaaaaagacttagaaagcttccgcgttaaatttgatgtatggttctcagaaacatcactatacaaaaacggaaaaatcgatcaagctcttgctgtattaaaagagcgtgaagagatctttgaagaagacggcgcaacttggttccgttcaatgacttacggcgatgacaaaaatcgtgtattaattaaaaacgacggttcttacacatacttaacgccagatatcgcgtatcaccgtgataaattagagcgtggttttgataagttaatcaacatttggggtgctgaccaccacggttacattcctcgtatgaaggctgctattcaagcacttggttacgataaagacacgcttgaagtagaaatcatccaaatggtacaactataccaaaatggtgaaaaaatgaagatgagtaagcgtacgggtaaagcagttacacttcgtgagcttatggaagaagtaggcgtggacgcaatgcgttacttcttcgcaatgcgtagcggtgattctcatttagacttcgatatggacttagctgtatcaaaatctaatgaaaacccagtatactatgcacaatatgctcatgctcgcgtatgcagtatccttcgtcaaggcgaagaattaggattagctgtagatggagatgtgaactataaacttgttacttctgagaaagaagtagagttactgaaaaaacttggtgaattcccagcggtagttgcggatgcagcacaaaaacgtctaccacaccgtattacaaactatgcatttgaattagcagcaacattacacagcttctacaatgcagaaaaagtattaaaccaagataacttagaattaagtaaagctcgttatgagttaatgaaagcagtacgcactacacttcaaaatgcattagcaatcgtaggagtatctgcaccagaaaaaatgtaatgaagaaaagcggaagcggctcgtttagaataggagggggatggagctcctgacagagaggtgtactttgcctcggaggaaggcgcgaagccaccgagtattctagccgctggaactggacaataaagaaaagcggagccgactgtttagtcccgaaggctaaggttctttcccacagaagatgcattttatcttctcgtggggaaggttcttagacagaaggggctaggaggcagagctggacataaagaaaagcggaagcggactttcgtttttaaataaaaggcaatcacacgatgttgtgattgcctttttatgtggagataataaaaaaaatttatcaaacaaaaggggaatttgcgtcgtcttatataaatgacaggaggcttatgatggaagaaaagatagaagaattaattgatatatataagcagcaaatatattccttatgctataagttagcgaaaacgaaagaagatgcggaagatatttttcaagagacgtggataaaggttttttcatcaaggcaccaacttttttatgtggataattataaaaagtggattactacaatttgcgttcgtacattttatgacttttaccgcaagaagaaaagatggaaagatcgcgtcttagatttatttcataaagaagatggtggagaaatagatttcgcagatgatgtgaatatatcagaagaatttattcaaaaagtggaagcggaaatgatacgggaagttatacagctattgaatgaaaaatataaaaccgtgctcgtactctactattatgaacaatactcttataaagaaatgagcgaaatattaaatataccgattggtacagtgaaatatcgccttaattatgcgaagaagcaaatgcgagaacatttggaggggttcgtttatgacagaagataaatttgaacagaaggtaaagagtagcttagcagaagagataactccaagcgaagagctaataaataacacgaagcagggcgtgcgaaaggctcagaagttagagaggaaatggatgatttgtattcacaccatttggattgttttgttaacaattgttatagaacaatttgtcacacatttggattataaaattcctatgttgatagccattgtgattatgatgcatgtatacattccgatatatgttgtaatacagtcatttttaaagaaggagtatagattacatgaaagagttcgctaatccgtttgtactatttgaagtagctggagtgacgatgtttttagcttttatagcacttttaatatgtgttgcatcatgggtatatacagatgctaaagcacatcaaatgagcaaaggatggagtattttagcagttatattgccattctttattgggtttttattatatatggtaagaagaagtaaaaagaaggttgaaggagaatgtaaggtgaattttgttaaaaaacagaaagtaacattagttgcgatattggcaagcacaatgtttgtattacttagtgcttttacttttgcacaaacgttagatgatgcatggagagccggggatatatatttagcaaatgagaagcaagggaaaacaagttatgaggcaaaattctcatcatgggatattgccagtaaggatattgaatttcagtatgaaaaggatacagaagtgacattttcttatgagacagatgcaaaacgaggaaacttatgttttagtgtgtatgaaagacaaggagaaggtataaaagagttaaaggaaatttgtgaatcgaaaaaaggtacttttacagttactttaaaagcaaatgaagaatatgtattgaatataagcggattaacagtaaaagatggatttgtaaaagtgaattggcaagagaaataaaaggggccctataaaggacctcttttttattgaatagtataagtaacagaaaaactaacaggactatagtaaacgtaaggtgcatgaaattgaacatacatatttccatctgtttttgcagtgaaaattcggccgtaaccatcagaataacgtccaattaggttatgatttgagtcataaacactgtaactaggagttttgctgttaggatgaattgttagttcttgtcctttttgaaggaaaataggttcttgttcagaactacctccagtttgcaaagaataaaattttgtaaagctttgttcttgagcggcagcagcgacttttgtttcaggaataaacgcagtagctccagtaattcctgctaaagttaatgcacctgctaaaatcatttttttcataatagaaaaagcctccttattagttgtaatcagttttgttacaattaatattgtatacgataatgggtaggataaaatatgcttttatgcatatatattttttctcaataaaagaccaccgataaatgaagtgcaccccaattgttagacacataactaacaattggaggtgcattttttagggctaccggggctaccggggctaccggggctaccggggctaccggggctaccggggctaccggggctaccggggctaccggggctaccggggctaccggttccactggacctactggcttcactggctccactgggcctaccggggcggctagtgtaggattaacaaactatctatatgtttttgatactactaaccaatcaattgcagtaggaagtagtgttacttttaacacaaatggacctataacaggaactgcccttagccacatcacaggtactggaaatattataattaatacactaggaacatatgtagcagagtttcaattacaagcttctcgcgaaaaccaattctccctcgaactaaatggtacaccaattccaggtgggcgttttggtacggggtcaccacattcaataaatcaaggtactgctgcttttaccgtaacagttgttccttcaacattgactttaataaataacacctcttcagcaggtactatcactctctcaaatagtgatggtggctctttaacaaatgtatctgcaagtataagtatttttcaggtcggataattaatttggttagaaaagtaattcataaagtttacaaataaaaaaatgaggcttctcttttctagagaaacctcattttttttattaaattttaaactgactcgtatacagatcaaaataaaaccctctatcttccataagagactcatgattccctctttctaaaattcttccatcctttataacaaggatttgatctgctttttcaattgttttaagtcggtgagcgattacaaaacttgtgcgacctctcattaaattatttagtcctgcttgtatttgtaattctgttcttgtgtcaatattagatgtcgcttcatcgagaattaatatatctgcatctgctaaaattgctcgtgcaatcgcaagaagttgtttttgtccttgacttaaattcgatccttctgaagcaatttctgtttcatattgatttggcaaatgcttaataaaagaatgtgcagatgctgccttagctgcagtgataacttcttcatcagtagcatctaagcgtccataacggatattatccataatcgaaccagcaaataaatacgtatcctgtaaaactactcctattttacttcgtaaagaattaatatcataatcttttatatcttttccatcaatatgaatttgtccttgctgtatatcgtaaaagcgagttaacaaattaatgattgttgttttccctgatccagtcgggccaactaaagcaattgtctctcctggctgcgctttaagactcacttcttttaaaatcgttttattctctgcatagccaaatgaaacattctcaagtgcaacatgcccttgtaaattttgtacaacaaatgcgtcttttttattttgaatttctggtacctcatccataatctcaaaaacacgttctccaccagcaactgccgcttgaattgtattcattaaagtcgcaaattgacttaacggtcttgagaattgacgagaataattaataaaagccgcaataacacccactgttgtcattccgtttaagaccataactgatccagtcccaatgacaagccccatacctaagttattaataaagttcatacttggaaaaataaaagctgaaaatgtatcagccttcgtagctgaaactcttagctgttcattaattttattgaaattttgtacagtttctttttcttttccatacaacgtcgtaacatccgcacctgtaattgcttcctcaataaatccatttaattcacctaaatctttttgacgcttcgcaaagtttttaccactatatgcaactagtttttttgtaacgtaaaacataataggtactgtaattaaagttacaattgctaaaatccaatttaaggcgaacatcgcaatcgttacacctataaaagttagcgctgatgaaataatttgtacaacactttgtgtcaaagcttggttcaaattatctatatcatttgtcacacggctcattaaatcaccttgagaacgcacatcaaagaaccgtaaagaaagcgtttggattttctcaaaaatatcttgtcgtattttttgaattgtttttaatgcaacgttaatcatgacaaatgtttgtaaccatgttaaaagtacagttacaccgtaaatcgcgataagtaacatacacattcttgctgtaccacttaaatctttcggtacaatatattgatctataatgactcccataaaatagggacctaataatccaagtaaagtagtaacaacgactagaaatataacaaacattagagcagctttttgatagcccatatagttccatatccgcattacagttccttgggcatttttagcttttcccatcttcggtgtgtttcgtccacctttattagcaaattgcccttgaaaattacgcatgttcttccccaccttctttatgcaaattaccaccttgggaaagataaatttcctgataaacctcacttcgttctaacaattgttcatgtgtaccattgccaactaattcaccattatctaatacaagtattttatccgcatccattatggaagaaattttggacgcgattaataatgtcgttgtgcctttatattttgtttttaaagctgtttgaatagtagcctctgattttgcatcaactgctgatgtagaatcatctaatatgagaatcggtggttttctcacaagtgcccttgcaattgatacacgttgtttttgtccacctgatagatttgtcgcaccttgtgttaaattatatcgataagattcttccagcttattgataaactcagtcgcacaagctgatgcagctgctacttccagctcatcatgtgttgcattttctttaccataacgtaaattctcttctatactacctgagaacaacaaagccttctgaggtacaaaccctattgaagcacggagtttttgcaaatcatatgttttaacatctattccatctatacatatttcaccttgatccacatcatatagacgtggtaacagtttcgctaaggtagatttaccacttccagttgatccaataatccctactttttcacctttttgtatgctaaacgaaatatcttttaaaacgtattcattatttttcgtatagctataactaacatttttaaattcgatattcccctcgattttctcaggttcgattgcattagctgcgcttataatatcaacctcggtatttaacacttgctgtacacgatccgcagatggaaaagctcgcgcaatttgaataaataccatgctaatcgacataagtgacattaaaatgatattcaagtaattaataaatgccaaaatcgctcctacttgaagcgttccattgaatactttttctccaccaatccataatgttgcgacaatcccgccacttacaactagcataatgattggcatcattaaagaaataagttgcacagctcgaatatttatcttcgttaaatttgtatttacacttccgaattgagcgatttcatatttttgtcttacatacgcttttataacacgtacaccagataaattttcttgtaactttgtattcactttgtccaatgcctcttgcacctttttaaatgtaccacttgctttacttgcaattaaaataatcgcaagtaataaaatcggaacaactacaagtaatattggaaataaccctcgcgctgttacaaaaacaataattatacttcccataaataacagtggaccacgaacgagaacacgtaatgtcatcgtcattgccgattgaatggaagtgatatcattcgtcacgatcgttaataatttacctgttccaaatgaatcacgattattactagaaaatgtttctattttcgcaaacacatcttttcgtatgtctgtagcgaaattaacagctgcttttgtagaatacatcatacacccaagccctccaactaaaccgagtgctgctgctcctatcataagaagccccatttttattacataatttaaatcccgatttgcaatcccaacatcaatgatatgttgcataatagtcggttgaattaagtccatcgcaacctcaagtaccataaatagcggtccaataatagcgaagaacatgtatggttttaaatactgtaataacttacgaaatgatttcatacataatctccttttcccatgaaattaccactgaataattcatatccctccttatttaattgatattttttgtaatttcttcattacttttattatattatgcaaattaatatttaacattattaaatgataagtattaatgactttctggtcaataaatgtgctttatattatgtaaatacaaaaaccgcattcttaatgaaaagaatacggttttttcatctatatttcttcaattgtaaaatttaaaaactcagtctcaaatcccttatttttagaaggactacacgtgtaaaaacctattttaataggctcattccctatatcctccattaaatgagcgattcttatttgttcccattgatggctctttttcacatatattgtataatcaccgcgttttcgaataattcgaaaacgaagttgttgcttagctgcttcagttggataatcttgcgttgaccagtcagaatatccattattcgttacgacagctcctaaatgagaagggccatctggaatatactctaatgaagttttcaaccaacacttttccgaaatcataacaaaaagacctgcttgatcgtattttgaatttggattcatacacaattgtacttcagcttgaaagtctgtcatcatttcattataaaatacatgaccattcatgacttcaaaaccataatgtgttttaagccaaaaatctgtttctgctttcgaacggacaataaacgcctgcttgtcattaattttataatattcagggacattcattatagtgagctgctcaacatgtttaggtatatatgatatattcatagttcctccataataaaacctttatacaaatatttaaaactccgctaatactgggaatttataacctttaaaatctaactctttatcacttcgaaccattaaatacttgctagactgtaattctgtaaactgtacatcctcaacccctaattgatccggtgaaaaataaaattcgatttccgtaaacctttcattgatttctccacataattcatctaaaaccggaagtactggcgcaaatactccaaataatttcaacttttcattgtctacttcataaacgattaaagcatctagtttctctgaataatacaatttctcattccattccgaatcatacatattcaaataaaatgaaggatggaagtttaaagttgaaaaactatttgaaagtctttggctactatcaatcgtttcatgtattaactgtctattctctatattatagaaatctaactttttaagtagtgaatggttattattaatatttttatcatatggtatagtcatcaaatattcctgcacaactttaaatccaaatgctgtatatagttcaggtttttccgtaaacaataatgcacattcacatttcttatcaatttcttctatcattttactcattaattgtgtcattagcccttgtctacggaaattagggtgtgtcattactgattgaatacccgccgcatttattttttcaccattaattaataatgggagtgaaaatgccgcaacatttgcaatcactttatcttcttgtaaaaatgataaagctttatatgtatcatcccaatatcctttatccgaaaaatcattcaatgtttgagttgtaattccaaacacttcttcaaataaaggaaataactgctctcttttcggttcttctattagaagacttgccaatttttcaacattccccatgttgtacctccaaatgttaaattccattaaattagatatacttatatgacctactcttaaaaatagaggtcttaccaatcaatatactatcataaaacataaaaaaaaagtctaattaattttatgtttcgactatttgaaaataagtcgaataaaaaaatattaagattttcggatattaattagtttattttataaaaatagcgctttctaattagcttttactaatagaaatacactatttataataaaatatttttattcttttatcccttcaagtctttccttcgtattaatttcttctccacttatacgcttttcaaaagactttctccaactatttgaaagtgcatttacttctaatatcctttttaccccttcaatattttgtttttccttatgcataatacggttagcgaatgctactgaaacaccttttggatcagactgtagtctttttaaggtgtcgactgatgatacccatccttcttttaatacacgaaaataaaatcctgtatatcctgtttcttgaaaatatagtggtaactttggaatattatatttttttgctaatttaaaacaaggttgccttggttgtgttacctgtacgattgcctgtcctagctcaaatgtatcaccaatacaaacatcctcttcgctcataccactaactgttatattttctccgaaagccccatatacaagatcttgattcaattctttttcccagtatggatagtgatcaccagtataaacacaaactgctttatctactcctccatgatgaattaagtcagcttgtccatccccattaaattttacaaaggataaatataccggttcctttacttgtttcttatttatgcctgtatgaactacctttccaccgtatgtaacctcttttggtaatcctatatttaaagataataattgatattcattagccattctatttcctcctttaaaggtgttacatgtattttctctcaattaatttttacaaccctctctgctatataaagatgattataaaacctttaaaatcattgttcaattcaattatttatataataatgataggtataacctattattatacttgaggtgattccaatcgaattacgacaacttgaatactttttagctgtttcaaaagaattacatttcacaaaagcagctgagaaattaaatatttcacagccttctctaagtcaacaaatacgtgcattagagcatgaagtaggaatgccacttttcgatcgaattggtaaaaaaatatctttaactgaagcagggaagattttattatcacatagtaaaaccatttttcatgaagtcgaacaagctcgttcagctattcaagacctaaacggattacagcaaggttccttaacaataggggctttgttaaccgtcctaaattatttactaccactaactattttaaatttcaataatttatatcccaatatagagctttctgtattagggcttcgcacaggagatattcgtgaaaaattattacgaaacgaactagatattggaattacatttctcccggtgcaagataaagagattatctctatccctctatacaaaagcgatcttacattagtcgtgccaactggtcatcgattagctgaacgtaatcatgtatctattgctgaattacagaactaccctttaattcttttacctaaaaatttctttttaaccgaactaattacatctcattgtcaaaaattcaactttaaaccaagaccaattttagaaattagcacgatggaatctttaatccaaatggtttccaaaggaatgggaattacagtgttacccaaaccatatatagactttttacaaaataaaaacattcaagctattaaaatagaaaaccctactccaacaattgaaatagggctaatttatagaaaagataaatatatgtgtgctgcaactcgagaatttattgagcaactaaaaagtacagtacgttctttccaaaactaaacaaaagagattatcctatgaaaccgtttcacaacgatctagtagaataatctcttttcaaaacaaagtaaacattatattaaactcttatagattttaatgtacctttttagatattggaatatatttagtaaaatatgcaccaactagcaataatacaattgaaaataaccaagtaaaagcaccgccaaagtgaaaccaatatgcaaacatatttaaaattgcgagtgaaaagaagcaaatagaagttaacgcacttttcaatccttttatcccagatttttttctcttttgataagcaatatacatcgcaataacaagaaaaaagataagaacaaatggtaacataacttttagcattggtaatccctccagtgtaaatgcactctcttcattatcatcttatctcatttatcttttaggcatcaattcattcttatcttccctccaaaagtcagtataagttttatttttaaagttcacgttcacctcagaaaacggcatacttcctccaactttcaatgagtaccagtcgtttaaaagtggtgatccgaaacaaatcttcattgtacgatcatgtaaatcgaataatacagaatgtaaagttccaaaccattcttcatagttatgtacagtcagtccatcaggatattcttcttctactaacttttttaaagactctatgctcacttgttcatatccatttaaatgctcatgtaaaacatgatatctctttgtagattgttctaatttcctattatttaatttctgaattgatgaactaactgcatggtttgttgatacaataaaagcttggttgtcaccatcaatcgttgttgtggatttatgaccgtcaaatatttcaatatgtgctgcgtttaaaggatcagctactattaaattaatattactagcaattggtatttcttctattagtgatttagcttcctgcacatttttacatttctccagcaacaatcgaattaccgcaaaacactgtaaaccatttaccattggctttcttaaacctgcaatgtttcctactggttgaccacatgctgaaaatgtaacagataatccatgttcgttaaccccttctgttcgaccaaaatattgagtagaaaagccactatgtgcatacgcaccttcaacatacgtcgagcaaaaacgcatatcatctattactggtgacaaatcataatttcttaatacataagtgtgagttgaatctgtctttttaggtaatactgcacaatgactacaacctgctttcaatagtgtttgatagtaatacatcatattttttgaaggaatttttaacacttcacaaaaaccttcaatttcttcattaattccagaacaatattgatttaatatatttctagattctgtccaatggttatgcgatattaagttttcttgctctataaattgcggaataagataagaatgttgtttcacaaattcaccttgttgcttaccaatttcataatgacttcctttgagcgatgaaaaatacccctttacttgatacatcaaattccccctcttattaaacatatccatatcgtaccaaatgaatcccattcattcttgatgttttttactaccttaactctatgccactttaaaacctccactaataattatttactaaataattatttttttgttaatatcgctatagaagctttacttcaaaataaaatagtttaatatcaaatgagcaaaatactatattgaacttactcgtaagcaatcatctaatttttgagattaagaaacttatttatcaaagcaaaaggaggatttatgtatgagcaattgcaaaccaattgatgaattaactattgaagacctaaaacaaaaccccatttgggaatggacaatagatgaagaggaaaacgaagaacatgacgaaacatgggtaaaaccagcagcaactactaattttacagaggagctaaacggttcaatcgtactaggcgaactattcttacataatggtgaaaaattccctatgatgtgtgaaattgacattgaaaataacgagacagtaattcgttctgttgtttattataacgaagcagaaaatgagtatattgctatagaagatattgtgaaaacggtcgaaatgccgttatcgattattattaacctaacaattcatgcagaatccaaaaccttacgcttcactgcacataaagtagatatttataaaaattcaataacgactaatttaaattaaagttgggcgaaataaagaaaacaattattaaataaagtgaagctttaatcagtgggggtcttactgcccagcaaatagcgggataaaaaccggaaaatgattatcgattccccggtttttcaaactagattaaagtattcccttttctactaaagtctctgcgatttgaactgaattccaagccgcaccttttaataggttatcagaaacaatccagaggtggaatccgtttggcatatcaggatctttacgtattcttccgacaaatgtatctattttcccttctgcatataatggcattggatacagctgtttactagggttatcctgcaaaataacacctggtgcatccattaatacttccttaatttccgtaacggttgcttctttttccagttctatataaactgattctgaatgccctgatacaactggaacacgtacacaagtagctgccattttcaggttttcatcttctaatattttcttcgtttcttgaatcatttttacttcttcaaaagtaaaatcattgtctgtaaatatatctacttgaggcagtacattaaacgctattgggtaatgttttttatcttttttcgccggtaatatattacttttcacttcttcaccagcaagcatagacttagcctgctcttgtaattcatgaatcgcatgaatgccagaacccgatacggcttgatatgttgaaacgataattctttctaaaccgaatgattttcgaatcggctgaagtgctgttaccatctgtaatgctgaacaatttggaactgcaatgatacctttatgctgctttaaagtatgcgcattcacttccggaacaacgagcggtacaccttgtgccattcggtactcacttgtgttatcaattacaatcgcaccactagaaactgcatgagttacaaattgtctagatacttctcccccagcgctaaaaaaggcaatatctacaccttcaaagctagttgtttttgcctcttttataattatctctcgtcctttgaatcttactttcttaccagcggatcgttttgacgaaagcaatgtgacttcaactatattaaacttcatttcattctctaacagttcaataattttttgccctaccgcacctgtagccccaacaacagctacatgatagcccttttttttcatcttttctcctccaatatcacctgtatgaatatttctacaatttcattttatacagaatttaatcatttggaaaattaaaatgcatgatataatcattcacaaatcatgataataaaagagggattgcttatggaaatgagacatgttaaaacattttgcgccattgtgaagtatggtaatttttctaaggctgcgcatgcgctaggttatgcgcaatctactgttacagcacatatgaaagctttagagaacgatttacatattcctcttttcgatcggttagggaaaaaagtgctacttacaaaagcaggtcatcaatttcatccttatgcattagaattactttcaatatatgaaaaagcgcaagaaatcccccaaaatacagattatttagaaggtacattaagtattacatctaatgaatcattagcggtataccgattaccacaattattacgtacttacaaacagaaaaatccgaaagtaaatatcgtacttgaaacaaacacaaatgaacaagcattacaaaaattacgtgaaggagaaacagacgttatcttcataattggagaaagtatagaacataatgattttattacgcgtacttttagtaatgaaatatttggatggattttaccagatcattccgctgcacatacaaatccattccagttattacaggacacccagttcatttttacagaacaaagctgcggctataggccaatggtagatcgttttttatgtcaaagtggaaatattccagctaaaacatttgaaacttccaatgttgaagtcattaaacaatccgttatgtgtgagttaggcatttcaattcttccttatatcgttgtacaagaaagttgccaaaaaggacaactatgttttcaacctatcgaaactccaacagttattcaaagttatgtaatctatcataaatctagatggatttccccggtattacaatcgttcctttccttacttgaacgagactaaaatattaagacgtacatagaaaaagagtaattgcctaataagcaattactctctttcattaattagtatactatttattagtctgtcccccacctgcaattaatttactacctgaatatgtacctttgttcataaacacttgattaattaattctttttgctcagcttccgacattactccttttccttctcctaaattcccactttgtaatttccaaatcttattatgatccccatcaaccttttcatattttccttgtttccatcgttctaaaatttctacatatgtacttccctgtacaagatcattactctttacaatatcaattaagctttcaatccgctcttgtgtaataaaaatatagccccacttttgatcagctttcgctttttgatgtgccatttcatgtaatgctgtctgtatattctcatctgtccatttaaaatttttattaaaaccactattcggcaatgaataatttccattttctaaaagctttgcatcttctgcttttacgttactatcagctaatacttctactgctggagcagctggtgatgcctttttcgcagctggtttactattatttaaataatgcagcataccatatgttaaacctactccaattaccgccataccagctataacacctattattttcaaaaatgttttcatctcgcttgtttcctcccaaatatctccgttctgactatctaattatttcttatataaaaactgttacttcattcaaaatatcgcatcccatcccctatcatattatttatatatacttcctcatattgtatttctttttctttaaaattgaaagattattctgttaaataatgaaaatattctacaaatttttcctttatatttataaagaaacaaaaaacaacgagggcgttctacaacactcgttgtttttactttatgcacgattttcttttaaccacttcgtaatagcatctaacttcgaaacatcaaaacgtctttcttcacacacgttcaaattttgtgagtttctcactatttctaattcattatttcttacactttttgcctcaattaatttacaatacccatctgtaacagtatttaaattttcataataacgctgaaacgattttgatatatgtaaatgtttttcaaagtttcttcttcttttcgtctcatcagatactttccgctttctaagttcttcatcgttcgtatataaataaaaatattgatccggaaagccaatttccctatttatcatcttttctttataaaaattttctattaaagataatggctgattaaatatatcaaaatgaaaacaccaattataactaagtggctgataaatatcgccatcgagtattactaattcatattgctttgacttctgaacagctatattccagcgctcaacttgtttttcaaaataccatgttctatgttcattttttggcctttcaaataaagaattcacttcaggtattatataagcaccataattcttttctaattcacggcacgtggtacttttaccaacagcgcttgctccctcaaatgctattatccccatagtttctccctctttcattaactaaaatttcgttgtttcgcttttcttccccataactttctccataaaacaattgaagcgacagtgagcatgattgttgtaatgatactaccttcaattccgaacgcgcctccatgcaatgtttctggtccatttgttatagacttaaaaattggagtagaatatacagttgtgccactaactgcaaaaccatatacattatattgagcccagttccaaattgagtgccatgcacatattccccacagaccgtcttctttcaatacatataaagctgcgaaaacacccactaatattatattcgatatagataatattgtaattcctggattaagtagatgaagaaatccaaataaaaatgaagttacaattattccaacccatatacgacttctaacagaaagaaccgggaataaccaacctcgtacaataatttcttccgttgccccttgtattaaaaatgcaactagagatcctgctattcctactatcactgttgaggtaatatgttgtacttgcaatttcacactccccattaataatagtagaataactggcgttgaaataaataaaaaccctattaacgcaccttttaaatactttctcatccatttctctttccaaaagccaatggatgaaaaaggtcttttttctacaaaacgaacccatataaataaaataaatatagctccgccaaacgttaacaccattctaacattgtcataaatacctttcatgaatatcgtttcagctttcggtaaaaataacataaataacataaaaagttcgcctaaagtcaaaaatataatggctaatattacagcaaagactggatggaccttttttctccctgcttttgctgcttcaattattataaatgaattatttttcactttcttttctccttttataatatttaactaccaacagtaaccaaccatattttaccacgaaaaatatattattaatatttactctaagtttttcttacatgattttgcataaatcccaattaggaataatatataaataaaagaggtgcctttgtgcctttactattatcacccagattactcagtggtattaccagcacttgctatttcccaccatttgttgtaagatagtaattaaggtcaatttaacactatattttctttgcatattatcaagtatcaatcagggacagtttgtactccttatgggtttttgataatatgtgaaattttattttcattcaaataaggccgatcatattgtaatttttctacttttaggaggcattaccatgacattaacaggtaaagtaaaatggtttaacagcgaaaaaggtttcggtttcatcgaagttgcagacggtaacgatgtattcgttcacttctcagctatcactggcgacggcttcaagtctcttgacgaaggtcaagaagttagctttgaagttgaagaaggtaaccgcggacctcaagctaaaaacgttgtaaagctataattcaaacaataaaaaggttgttaccagcaaggttaacaacctttttaatatataactaaaattttttacataaaaggagtggttacatgtatcgcaatcgaaagaacgatgtagcagaagtaccaccagaacaaacccctgtttgggaatgtgaatcagaggattgtttaggatggatgagaaagaacttttcatttgaagaagagcctaaatgccctttatgtaaaagtagcatgaaaagcggagaacgtttattacctaaattaggttaatttataataaaaaaaacctcttttaattaagaggttttttttattataaatttatgtcctcaacatcagttcgcactatagaatacaacaatgcatcgtgttgcttatttccttgatgaatatatccgcgcaatagcccttccttttggaagccaattttagataacattctacaagaagtaacattttcaggatatgtaatagctccaattctaaacaaacctaaatctttaaatccataattaataatttctccagctgcttctgaagcataaccatttccccaatagcgaggatgcagatcatatccaatctcagatcgtttactccataattgtaaattgtttagtccaattgttcctattaaaacgttcgtttcttttaacacaattccccatcgtattgcctttttctcaaagtaattttttgaaaaagattcgatcatacgtgaagcttgtccaaactccgtaaaagaattcataccgtagtaacacgtcacttcatccaatgaaaagatttcatatattttttgacaataagattgttctatttcaactaaacgtaagcgttctgtttctagtataggaaatgccataggatcactcctttctctctactcattcattatatcagaaaaaatatgtataattagtaaagtccttattgttccataaatcaaacatttctaatggcacattctctcttaattctatatacacgaattagataccttctgattgcacctcaaacatgacgctataatttccataaatcgaattttaaattatcaagaactgtaaagaaattgtttcttcattttctccttctaaacaacaaacctaccccttacatttatggtaaaatatagttaatatattattttattgtggaggtgaagatttcctatgtatatattcatcggcttatccctcttactcatattacttatttttttattcgcaaaaaaattcacaccaaactcattcatgatgactagctttaaaggtaatagctttaggacattttcaatcggtattttaatcgctgccatactctcactttcatatggaacttatcatgcggtaacatatcaacctagttatttagatattaaattaaaaaatcaaaactatactgttttcggtaatataggcgaattcggttatttctccgaagaattattaaaaaaagatacagaagtacaactatatttcgtctcttggaaaacaatacagttaaaaaatccggtaatacttatagaatatccttcaggaaaacaagaaacatggaagccaaatatcgtatcaataccggtaaataaattacaagaaaaacatgatataaaagatatttatcaactatcaccgtattcatttaaagagtctggagaaataacattaacattaaaagaaaacaatataaaaaacaatacaatttccattcaaataaaataaataaaaactgttcctccattttgctgaaggaacagcttttatttattctacagtattatttatttaatgtagccattatttcattggctatattttttccatttccaatacacgcaccaattccgacaccataatatgaggcaccagctaaatatacatttggataaagattcgtcattttttcttgcaatgcttgaaccgcttgattatgttctaaatgatatttcggcattaaatctttccaatttgtaacttcgactacttctggttcacctttaattccgagactcttttcaatatcatataaagctactcgtactaattcttcttcactataatttttgattgtttcatataccggattggtgctcttataaaacattcttactaataatttttgtttacccgatgtatgtttccactttcgacttgtccatgtacaagcatcacaatgtaaatcactgttttccgttacaataaaccctgtgccgtcagctggtagttgttcatctagtatgtcaaatcctaagtaaatacttataagagatgagtttttaaatgtattaaactgctcatttaactcattagactgtaataaagtttgtgctatatcatgcggagctgctaaaacaacataatcagcttgtattgtttcatgatttacaaaagaaatctcatatcgatcttcttgtttacttacagccgtcgttatagcacctttttttacgacagtttcagtgagcacttcttctaagcgattaattatcgtagatagtccacctttaaatgatacgaattttttatttcctgctgattgaaattgttttttattctcttcaaaacctttaataatacttccatacttatttttataatccagtaaatacggtaatgtagatgccattgtaagctcattcaatttaccagaatatacgcctgaaagtacaggagcaatttgtctttccactaactctttccctaagaaactttctaaaaatagagcaagtgatgtatctttcgtaaactctttatttttcgttatgaaatcttttaaagctacgattttccctttcgttgagactagcgtactgctaaacaaagactgggcgctcatcggtatcccaaatatagtatcagaaggaatcggatgtaacatgttttcagaatatatgtaagaaatacccgtttcattatataccatttcatcttctaaatttaaatcttttacaagtggcataacatattcattacgagcaacgattgaatccgctcctgactccataatgaaatccttttcttccacactatggattttaccacctaaatactctgctttctcaataagaattaaatttaaatcgatattataatccttttttaatttttctaaataaaacatagtagaaagtcccgttatacctccaccgataacaacaactgttttcatatgtgctgcgctcctaaccgatacaattaataattcctttttattataaccaaaagtccttatattcgactagcaagttgcgcattctgtaaaaaattagacaatatatttgaatatattttcaaattacctaataaaaaagaactataacatatacaaaccacgtcatagttctctttattttaaaaacataaagtaattgattaatttgtctagttcttgactcaatgccaatactttttcatgttgaattccataatccgatactaaatataaaagttcttctttttttatttcaattactttttccaatttcgctagttccatgtcgttttacatctctccaaaaataaaatgtatgtatttcagtatagcctacttacataattagtaaaagtaaaatacgcatgtaaaatcttacatatttgaaaaaataatatactactaacaaaaaaagaaactagattaagcttccttttacagattattgacgttcattaagaatgaataacataccggaatttttctaatgttatatctttataatttggagctctctttatatgattaaaataactagcaattgcagctgctccaaaatgcgcatgccaaatatcatttgtttcttttttacattgagaaataattgaaaggccgccttttaaaatacttttgttttccattttctttctcctctagttaaaatcactatattttcatcctaaagatggtgtcagtacaaataaaatgtgattcgattcatcacttttattcaaaaatcgatgcttcacatttggtggaatacgtacaacatcgccttcttctaaaaaatattcttttccctccaattctacatacacttcccctttcataataacagcaatctcttccttatcttcatgggaataatgactttctgttgtgtttgcttgtttatttaaatccatcattaacatttcaatacgtgctttcataaaatcaggtgttaatacatcatatacaatgtgatcattgttttcccgatatactttttttcgatcttttttcttagaaatgagcgaatctgtatcgatatcattaataaaaagtgtaaacagcggtacatttaatgcttttgcaattaactccaaaacatttaaagaaggattagcatgtcctctttcaatttggctaattagtgacgtactaatccctgcataatcagcgaattcacgaattgtcatattatttttcttacgataacttaatactgtttgtccaagcctatcatgtatcatagtaaaacttcctttcgtccatcataatgcatatttcattgtctttgtgctgacatactaaacaaaggcaaataatcctttcctattatctccgggacttatatacttacttttgtacattatatcgcattaagtttattataataaacattctatcggagggacaaactttgaaatcacctattctttcatatttcatcttattttttggtgtattcgccttatcaacttcagcaatttttgtaaaattggcagatgctcctgcgacaatcattgctttttaccgattattctttgccacactgatcctgttaccgttattactatttaataaaaatagtcgaaatgagctaaaaactttaacgaaaaaacaatggacattcggattcacatctgggctatttttagctgcacattatgtactatggtttgaatcattacaatatacttctgtagcaagctctacagttatcgtaacgttacaacctttgttctcaatgattggtggttattttttatttaaggagagatttacgaaaggagcggttattggttgcctcatcgctatttcaggtagtatcatcattggctggcaagatttcaaaattagtggagaagctttatatggagatattttagcatttatcgctgccggtatcattactgcttattttttcattagccaacacgttcgtaaagatttgtcacttataccatattcggtaattagttatggaagtagtgctggctttcttagcatatttgctttcatgcaacaagaatctttcatccattactctacacaaacttggttgtgctttattggattagctttcattgctacaattttaggacaaaccatttttaattggttattaaaatggatgagtgctactgtaatttcaatgagtattttaggtgaaacaattggcacttgtatgctagcgtactttatattacatgagactatttctttacaacaaggactaggaattaccgttatttttattggtttagtattatttttattacagccaaattctaatgaaaaagcatgacagtatactgtcatgcttttaactattcattatgtacaattaaaccattcggtctaaaacgactcatcataatttcattaataaattttccgtgagctttcaaattccctatctttactccctcttctacaaatccaaatttttcatataaagcttttgcttttggattcgtttctaacacacctagttctactctctctaacattaaccaattatcagccagatcaagcatcttcataagaagtgctttcccaattcctttattatgatattcactgtctaccccaatgaataaatcgcctgaatgagatcttcggcccggactttgtgttaaacctacaaatccaacaacttctccatcatattctgcaacaaattcaaattgatttggtgctaaatttcgaattctattttccatagcttctacacgcatgctaggtaagaaaaccatatacggtaaaacgtcatcctgtatacatatacgatgaattgctctagcatcttgtatttctactgctctaacgttgatccccatctttctctcctccatataaataacaatatatttgtttgtgtgtaattctagaaacgtgtatgaatgaccttctcactcgtatttctttatgtcatttttacataattatttcgatataatacttaatttccaaaaagattaacaactatatggatttggttaacttttcgcctcgttatataaattaagcaaattttcaattggaataccatttagtttcatgccgactatattacaattttctatttcaatatttttcagattactattacttatagtgctgccttccaaatcacatttatcgaatacaataggttccttctcatctccgagacttgtatttttaaattgcactccacctaaagtcaccaaattaaatttactgccagaaagatttaaatctgcatatgatgaccatctaaaatttatatttctaaactttgattgacttacattacaattactcatattcatatttattatattgctaccaacaaatgaactgttttttaaattcacttgataataccctgtattcgctaaattacagttttcgtattgactatttttcatatctttatttgtaactacactctctttgtttgagcttgtttttattcttttcacgtaacaatactcatcttccgattcaaaaatcatttggtagcccatctttttataaaagtgatgattattaatttgtctactagatgtttcgagatcccaaatctttatgtttggatattccttttctattaatttcataacatgtgatccaattccttttccttgataaacaggatctacaaaaatacgatcaattcgaccgtacgacttaccagaaatcgtaactattatccctccaattatttctttatccattacaactttgaaagaatccaattcttcaatggaatattccatcatttcaactgaagagtaccctggcggttgaatgttataatcaatgacatcatcttggccgtatagccattgttttgcttctgcatcaaatgttcttttcattatttctgttaatttctcagcatctaaaattgtagctttttctatagatattctcgtcattttcgttttccccttcattattacaaaccaaccattttgtgaatgccataattatcaattcacttttatttttaatacttttcccattattacatatggaacatcatttttacttggatgaaatggctctaaaacatttacccaatctaatctttcatataacgaacgtgctttttcattgtttatttgtgttgttaaaacactcgttctatttgaaagcccttctagtaattcattatgtaatttcgttccaagacctttattttgatattgtgggtgaactgctaactctacaaattcaaaacaatcttgcaaccattcgtctacttgctctagatgtaacgcttctctcattaattgattatagtactgtccctcgattgagcgataaccataagtaaagccaactacttcattttcatcatttattgctactatacctttaaaacctgtatattctatatgcctattcattcgctcgatcatttcattgaaatttattttctcaaatactttacaatacaattttgccatatcctcaattaagatttcatctttttcaatgcttacgaatttcactttattcccccctgttaaacatttacatacttaaaattttaaaaacaaagaaaattaatactaatcactctctttactattaaactacaaatcatcctatattttccacaattacttagtattaatgaataaaagaagagaccatgtaatatcaacatggtctcttcttttattcattttcaattttattccgctatttgccgggcagtaagacccccatctcaaaattcagcgaaagcaaagaagttaggtgggggtcgggctaataatcagcgggggctgacaccccactgattaaagtttcactttatataattaaaaattagatattacttaagccaatcgttgcaagtgttacttaactgctgtaaatcttctataaattgactcgcatcatatccatcacaaaccgaatgatgtacttgcaatgaaactggtagcataaccttatttccttcgttaaaatatttcccacaagttataattggcaatagaaaattttcatcattattaatattaagattaaatccagtaaaactagtccaaggtatgctagaaatcggaaatacattaggaggaatattttctttcgtgaaaagaccatgaacactagcatagcatctcatatcgtcttcataatttttatagaaagtgcggaaatcacttgaataatccgtccatatacttgaaaaagacttatcatctttatgaaagattgtataactcggtatcatttcctcccaatagcctaaaactccttcatcgttaaaacatgttcgaaattttttatgattatttactactctagaaattaaatatataaaaacgggataaaattttattcccttttgatatactttctctaataacatcgtgatatcaacattaacagtcatactaaatgtacatttcaactttaaataatgctcaaaatactgctctctattccaatcttctctatcaattacatgaaacttcattctaatagcctcctaaaattttctttttattttagaaggctatttcccttgcttcaccataattgttcactcctaacagtttacatttcaccctaattatttatttaattatataacatatgtaagaatcaattcacatatttcttgaaatccatccacatactatagataaatcaaatgaaatttggaggatacatacatgaataacaaaaatatgaataaaaaagaaaatgttactgaaaatactacatctattcaaaataataatactgcaaaccttactattgaagaacaagcaatgaacggcttatacggaatgcccgaaacaacaattgaagatgctgatcacgctgcagctgatgatttgacttcaaaaaattaattaactacattgaaaaaagccaaggaaaatacccttggcttttttaactatgcatccaccttttgtatttcttcactctttcttgaaagtttacctggccaaaaagcaaatcggcctaacacaactgtaattgcgggtacaagtaacggtcttacgataaacgtatctagtaatacgccaattgcagttacaataccaaattgaactaatacttgaattggaagtgtacctaacactgcaaaagttcctgctaaaattaaacctgccgatgtaataacactacctgtttgtattacaccattttttactgcatccaagtgattttgtgtctttctgtttttccatatttctgaaaccataaagatattataatcttcacctaaagcaactaaaaatacgaatgcgtacaacggtatcgcaccttgaatggccggcgctcccataccgtaatgaagcaatatccatcctgctcctaacgctgagaagaatgataaaacgacagttacaattaaataaatcatcgcaacaaccgatcgtaagtagacaagtaatagtaaagcgataatgctaatcattactggaataattactgattcatcacgttcagtaatttgctttgtatcatataatgaagctgtttctccaccaatccacaattgctcttcagcattactaatcccagcatcttttaatactttttctacattacttttcaatttaggaatttgatctaacgcttcaattgagtatggattttccgctaaagaaacttcatacatttgtatttgcttattttcttttccctcttttggctctttcactgtatttatgaaagaaaatttctctagttcttgtttaataggaagctcttttcctttcgtatcaacaaccacttttactggtgctagttcaccagctgagaaatgatcactaattaacgtaaacccttcacgagaaggcatatcctttggaaacgattctaataagtcatatgtgtattgaatacgtggtacgaacgaagccaatccacctaatacaaacacagttagcataattattgtccacggtcttcgtactactacatctccaagttttttactaaaggagccttttgatttttcaacttttacagccctctttttctttcttgcaaactcctcattcattgaagttgttctcggtataaacgggaaaaatgcaatcctaccgaaaattaataatagtgctggtaaaatcgttaaagccgcgattcccattataaatacagcaacactaaatggtactgcaaatcgatgaaaggcaccataatgagcaagtaataatgtccctaatccaagtacaacagttaacgcactcattattattgcaccgccagaagctttaatcgcaagttgtaatgctttatatttactttcttcttctaacaagtactctctatatctcgaaattaaaaatagacaatagtccgttccagcaccaaacaataatactgtcataattgatatcgcttgggcatctactttaatccatccgtgatcagctaaaaaaccgagtgtaggactaatgataccgtatgcaaagccaacaacaagtataggtaaaattgctaaaattggcgaacggtaaagcaaaattaataggaccaagactaataatacagtagccactaacaatttcacatctgcttgactaaataaactaactgcatccgtttgaatacctacaggcccagataatcgaacatgtaaaccagattcacttattttttgtttaaatggatcttcatccaccttactattcactatttttctaaactcttccagatttccttttaatatatccgtaccagcagatttattaaagaatactggtgtaacaaatgatgtaccatcttttgatgcactttttgataatacttgctctggaattgtatcaaatggcggtaacgttgattgttcttttaaaggactagcttttaactctttataaacgtcttgtatgagtttataatcctgtgactgtaatccaccatctctataccatactactaacaacggattccctgcattattcggaaactcttttttcataagcgcttccgcttgctgtgacatagctgtttcaggtaaattttttggattcggttctttcgtactgtttacttgtggtaacgtaaatgaaagtaataatgtaataagaacccacaccgataaagtgatccattgcatatttttccctgctacaagcctccctaacatatgtaacgggtgctttttcataaaaacccaccttccttttttcctccattattaattatatatactggtcggttaattaatcaagaatgattgaaaattatgttataattatctcaatcataaatgtcaggagcgaatgtatttggaacaaaaacaacgtcctctcggaaggccgcgtcaaaataaaaatacaaaatctacaaaagaaaccattttagaagtagcaacccgcttatttcttacacaaaattatcaagtcgtttctatggatgaggttgcaaaagtttgtggtgttacgaaagcaactgtctactattactattcaacaaaagccgatttatttaccgctactatgatcgaaatgatggtacgtatacgtgagaatatgtctcaaatactctctacaaacaaaactttagaagaaagattattagacttcgctaaagtttacttacacgcaacgatggatattgatatgaaaaattttatgaaagatgcaaaactgtcgttatctgaagaacaattgaaacaattaaaaaatgctgaagataatatgtatgaagtactagaaaaagcactcgataatgcgatgcacatcggagaaattccgaaaggaaacgctaaatttgcggctcatgctttcgtatctttattatcaattgggaattttaaagatgaaaatcacaatcctattctggcaaatatagatgaattagcacaagaaatcgtttctttttattggaatgggttaggtcattcatattaaactgatttactttaataaaagagcatatttaattttttcaaacatgctcttttataatttatttatatactaataatcagattatacttcaacgtcacttaacaaaaaactccattttaactttacaaattttgaagttgaacatttatattctccttacttaatcccccatggtaacaaactacagattcaatatgtaaatttaaatacttcttcaaagactgctttgcttccttaatatttatagttgttggggcgtgaattcctcctaacatcccattcacactatacatagagtctcctgcaataagaattttgctttgtttcaaatataaactaatatgacccggagtatgccctggagtatgaagaattagtattccaccacaatacggaagttcttgcccgtcaatcacagtatcactcacttttccttttgggcggttctctacatttccgtccttcaataaaggtaaatccccctcgatatatggcttatctagttcgtgcgcataaactttaatattacttcgacagcgctgcaacaattctggcagactacctatatgatcaatatcctgatgcgtcaaaatcacgacttttaacttatcaaatgataccccaaccttttccatctttacttgtatatcttcaatttgtcctgggaaacccgtatctattaatactgccatttcatcattccataaaagaattggatgaataacaaattcttgaaattcaagttgtaacatttctactcctttagcaatctccatacagccattctcctttatgttgaagtttgaaaatatgtacaagtaaactgaaaatataaagtgaaactttaatccgtggggttttactacccgacaaatagcaggataaagcacctctatcttataatatgttttgtcatcccaatagagaatgcttcaaaccctatagattcatagtaagattgcaatttttctacacacataagttgtggaataaccttgttttgttcacagtgctggattaatcgtttcactatttcttttccgatgccactagactgatattttggcaatacaccaactccacaaataatgcctgttatgactccatctgatatgacacgccccatccctactaacctcttatcatcaaaaacataaattgcataccaactttgcttacacattcgttctaactcgttaaccgttaatttaagagaattccatcctaaagattcgtataaggataataatccattaaaatctgtagggtgttcacttgtgtagcgtatactattttccatgtaaacactccctattctctagcttgtttatatttcataaaattccctttacacaaatctgatcgatgtaaaaataactagaacaaacttcaataagaaagatagaattccttctcaatataaaataaaaagaagttatctcacttaagataacttcttttatataagactctcattatattatcaaccaaaaattatacaactacatacgataagcacaaacaaaactaataaaccatttgagaaataacccattaaatactacccctttattaaattatgtaaaagattttatcataaaatgatttacaacttaataactgaaaaagacattgtattcattagttatatacgtttagtaatattttatattcggttatattctcgttccctaaaaccacttctcgcatcctcataattcagtccacataaattcaaaaaacagttattagtaaacattcatttactataaagagtaattttaattgatttatattgaatttagtaataaaataataactaaactcataaaggaatcaaaaacaatgaaccaaaacgaattattaaacgaatacatgaatttattattaaatatgtcaggtacttttaaattactatcggagaaatcctcagaatttacacatttagaacaacatgtagtagagtatatcgcccagcaaaaggtgcctgtaaatttaaaaatgattgctagttatttaaacatccctaaacaacaattaagtgtaacagtacgtaacttagaacaaaacggatacatcataaaaaagaaagatatggtagacaaaagagctatattaatctctctgacagaaaaagctgaaaaagtacattatgagagatggaaacaaatatataataatttcacagtaaacctcgaaaagttatctgaagaagataggcgggatttaacttatggactatataaaacaaatacaatgctctcaaaaatgttaaataacgactaaatatattgtttattactaaacggaggatgtttcatggctaaagaattagatttacaatccgtgcaaggtacgatgcttattcccttatggggaagagcatatggcagtgagaaaaataaggatattttagatgatatagaggctattcgaattattaaagaatgtaattttgacttctcaacaatagcaaatatatttggcgaatacggatgtatcacatacattacccgtgcacgaaaaattgacgatacgataaaacaatttataataaaacacccgaatgctactattgtaaacatcggttccggactagacactactttttcaagaatcgataacggtacaatacattggtacaaccttgatttgcccgatgcaatctcttttcgcaaaactttaattgaagatacgcctagaaatattagcattgctaaatcactatttgatacttcttggtttgacgatataaaatataattcaaacgacggtattctttttatatcagcaggtgtgttttattactttaaagaagaagatttaaaaaagatcgtagtcgctatgtcaaaacgtttccctggaggagaattatattttgacgctgaatcaaagttcgcactgaatctttcgaatgctactgtaaagaaatccggtaataatggtgctatgatgtatttttacgtaaacaatccaaaattaatagaaaaatggtcctctacaataaaagtattaagctgctcccctttctttaaagatatacctacaaataaagattgggacggtagtacgcgtataatgatgagaattgtaaacttaataaaaatgttgaagtttgttcatttacggttcaaaaaataataagtaaagaagagctcaatacatttatacttaggttataaatgttaatttcaataaaatcaaaggcagaaacataattgtgaagtgaaaatttaatcagtgggggctttgctcatcccccactgattattagccctcaccaatcgagcttttacggcagcccgaaccccacctaacttctttgctttcgctgaattttgaggtaggggtcttactgcccgacaaatagcgggataaaatcttgcatgcactttacgtaggagctaaaatgttgaatctcaccgatttccaaatcatgtacaccatcttgcaacattaactgattcatttatcctctctcctcatcgctcacttattactatctaaatgtataagttctgaccattcacacttttcccctttatatcctttagacactatcctcatttatatgaatagctttcttattcaaaaatagatttttaaaaattcctactcccacaattaataaacctataccaactaatttatttatttgtaatggaatgctctccattccaaataatccaaatgtatcaatgcataacgcaacaaccaattgagtaataagactaattagcaccgtatatgctggacctagactctttattgcacccattatacaaataattaacccgataccaaacagtccacttacataaaacaaataatttgcagtatacactttaatgctaatactgttttctgtaatgatataaaatagaatagagctaatgagacctatcccaaggacacatgtagttattaaccactgtcctacattttcatttacttttgcattaaaaacagattgtacgctaattaatattcctgctaatatagctaaactaaatccaatcaaaatcttcctctccctttcattgctcatatatattatctttagcgacttccttcattctagaaaaatctttaattacaataactccattactctttttaattagtttttcattataaaatctttgtaatacccgaattacgtgcctataacttacccctataaaatctgcaatactcgttactgaagttgcatccaaatcccctttatacatattcccgttactatctgttgaaattgaaagcaaataactagctacacgtacttctacaggataaagtaaattaagagcagtaaaacgagtcgatatttttaacgtgttcgcaatgttttcaagcaagaacttcataaatataggatcatgtaataacttgtttctaataaccgtattagaaatagagattgctacaacatctgaacaagcctcaacgatattatgtgctttgctattttgaattaattcaatatcaccaacaatggccaatggattgataaagcgaaggattagtttcttcccttcaggtgtaatcgtgtaaacttttactttacctttaacaacaaaatataaacgatccatttcgtcatctatattgcaaataagctcgcctttttcaaagtgatttaattgaaaataagctgtatctatttctgaaaaaatctcgagcgttttattggttttcaaataatgcgtaattaaacctgatctatcctccatattcatttctcctttcatttacatattaaatacaacaatacctataatcattattattgttcccacaatatgatatctctccatctgtatcttttttatatgaaatagtcctttcatttcaataactgttgccgttaacaattgagcaaccataagtgtgccagctgtcaatgtaactcctagtgcatatatcgccatagtttctgcacaaataatgaatccaccaaatgcacccgctgctaaatatatttttttcacactctttaaattcgttattttctcttctttctttaacaaaaatacagttgttacaataatgaatccaattaaatgggttataatactcgtcgaccatataccgatatgtgaactaagtttcgcattaaaggttccttgaagtgttataaatatccccgcaaaaacagcaaatataatacctttcaaaaaatcatctcctcatcctttatttctgacttaattaaaaaccatcatcctataatggcaaaaggacaaatgtcacatcactatgaaaacaacttggaatgaacaaaaaaacacacctcaaaaatgcggggtgtgtttatgtttattatttatatataaagttttataaatttaaattacgctacattaaaatatttctttttcataacaaactttgtaaataagaaacgtacaagcggtcccataataattaattgtaatggatatgccattatgaaatttttaataaaaatcgaaaaataaatggaaacaaatgaatctccttgtagtccaccatgtaaatacatcatagccataccgaaaaatgacataaagaacaccattccaattaccatagttgtcgccattgcaacgataatatttatttttttagatttatcaaatggcaatatgaatacaatttttttcgcacaaggtccaacgatacatatttcaattaatagtgcaataataaagccaattaatagttctaatgcaatctctttaatataaattggtcctcctgtttcattcattagtaaattgtaaaacgtcattacgataaccatcccaaggcacatcatcatgccaaattggagtttttcctttcttgttgttggcaaatttcatcatcctttctctttgagtctttgtcattatatcgacattggaaacctcttcgtaagtgaacattttgtgaacaaatttaaaacgttttcattttttcctttctactcaaattctcacttttacttatagaggttatatatatcgcaatgttgaattactaaatttaacattgcattacactattactaggaggataaccatgaatgaagcagaattttacgcatatcacatcgtaacaaggaaaaaaatgcatatcggacaaatcattctttttaacaaaaatcaacacaatactctatatcacttcttttttgaaagagaacaattaaatgctagtggtgaagatggcatacaaattttaaataaacactataaaaataacgaattacatataaataatgaaaatactaaagtagttatgagttatatggatcaaacaattagagcagttagagaaacaattgtagaaatggttagactacaagaattccctgaatacccttccaggttatcttgtttatacgcttcaaaaagctatgaagatgctttaaaatggaaaacattatttgattcttacaatcgagaagttttacagattgttaaactacgagtgattggaaattcttttgaaggtgacgggaatcttttaccgaaagaagatggaattcctttttctcaaaaaatcgaacaagctagagagtattggaaaggaaatattagaaatgatcttcctgagctactgattaatggagaaattgaagtggtggaaattattgatgacttttcctcaattcatatttaatttctaactaaatcatataggatggagattacaatgaagaaaaaagtgtacttcaatcatgatggcggcgtagatgatttaatttcattatttttattacttcaaatggaaaacattgaacttacgggggtatctgttatcccagcagactgctatttagaacccgcaatgtctgccagtcgtaaaattatcgatcgcttcggcaaaggtaatattgccgtagccgcttcaaactctcgcgggcaaaacccgtttccgaaagactggcggatgcatgcattttatgtagatgctctaccaattttaaatgagtctggaaaagttgtaacacccgtggtggcaaaacccgcgcatcatcatttaatagaaacgcttctacaaacggaaggaaaaacaactttattatttactgggcccctaactgaccttgctcgtgcattatatgaagctcccataatcgaagataaaattgaacgcctcgtttggatgggtggtacatttcttaaagctggcaatgtacatgaaccagagcatgatggaacagctgagtggaattcgttttgggatcctgaagcagtagctcgtgtatgggatgcaaaaattaaaatcgacttagtgacactagaaagtacaaaccaagttccgttaactataaacatacgtgaacagtgggcaaaagagcgaaagtatattggtatggatttccttggtcaatgctatgcaatggtccctcctctcgttcacttctcaacgaactctacttactatttatgggatgtactaactaccgcttttgtcggaaacactagccttgcaaaaactgaaacgattaatagtatcgttcatacatacggaccaagccaaggacgtacagaagaaactactgatggacgacctgtaaatgtcgtttatgatgtaaaacatgatgttttctttgaatatattactgaattagcaaagaaagctgctacttaaaacctcaataacacgaaaaaatttattaagaatgatatactttaattaatataacatgaggtgataagatggattatgagttactaaaagaacgaatagaaattataacttctagaattaaatacataggtggtgaagttcaagaagtttgtatagatgaaccatcttcccttgaacaaataatccaagtagaagaaaaactgggtattaaactaccaaatagcttcaaaaaagtacttttagagttctcaggaaattttagcttacgctggtttttacctgatgatgtagagctaccaaatgaatttactgatattttttgcggaacaccccactggagtttagaaagtctttctgaattcgaaaaagaacgtaaagacttggttgacgagtttttttcaaatctagatgatgaatatgatgtagtttggcacaacaaattagcattttgtgaagtgggaaatggagattatttagcatttgatatgaaagatgatatagatgctccgataatttacctaagccacgacgatggagaaggacatgggtataagattgcgaataatttcattgaattcattgagaattggtcaagggtagcttttgtaggatgcgaagattggcagtggttacctttcactaccagttttgaaagtggtgtaaatccagatgatgaaccagccaaaaaatttagaaattgcttggaacttaatatttaaaagagtattgaattaaatttcaatactctttttgtgcaatttaattatatttgattaatgtagtgtcttacagattattcatttcataaccattgacaaaatacgttattgtttctaactcatctgcatttaattctctatctagctcttgtttatacgctgcctttatcttctcttcatcgcctttatgagcttctgtatatgttcctactgtttttagcaaatgaatttcttgtaaaaactcgtctcgatttatagctgccccatgagaaagaatatatgtctcagcatcaaatttctctaattcatctatcaatttaaacgttcttttcgtcgtatagttccactttgaagaaaaaatatctgcatatatacaatctcctacaaacaatatcttttcttcttttatatacataacaactgaatcatgcgcatgatctccgcccacatgttttaacacgcatgtcacttcaccaaggtctaattccatttgatcctggaacgttaaggttggaggaataatgttaatatttctcgctttttcttcaaactctttcttaatacaatccgcacaaaatgcaatttcagtaccctcttttacgcgtgcgtccaacgcttcatctgtccattcataagatactattgcctgcatttcttttttcgtttcagcctgcgaaatagttaatgcattctgtaatacagataatccaaaaatatgatcccaatgccaatgcgttaatgctacaaaatcaggattcgatacattttgttcttttaacatttctaaaaataattgtgcatgttcttctgaatttcctgcatcaatcattaacgttttttcttgtccaacgaccattcctaagataggtctatctgtttcagaaacaggtgtcatataccaaaatgagtttcctatttttttaatttgttgcataaccaattccccttttcattttctcacttaaaattaatatataaattataacgaatcactacttttttctctataatcaaacacaattacttggactaatctaactttccttttcgtaagctaaaaataagggaatagaatcggagtgtgatactatggaacgtttatggattccaatgattgtaacatttttttcgttcggtggattactattaggaggtgctgttggagtagcaacacgccaacttattgaagaaaagatgcatcgtttatacgcattatgtggtggtattttacttgggcttttatcccttgaaattattcctgaaacattttcaagctacgaaatggttgggcctatacttggtatagctatcggtattttagttatgagcttattagataactattgtcaccatccaatgatacataaaaaagatcaacaagcatggcaaaccttcctttttctctctttcgctatatttattcataatataccgagtggatttgcgttaggtacagcttttataaatcataatgactctgccattccctttttaatagcaatcgtcgttcaccatattccagaaggattagctttaattattccatttctttttacaaaacataaatatatttcctttttattaacgactttattactttctcttattctcggtactggcacagtttttggcattttgatggaaggaaaagctcttcacctgcaaggcctcattatgggaagtgctatcggttcacttggatatgtcacaattcatgaaatgctttggaaagctaagaaacagctctctttccttacatttctaatgtgggcaactagtggttttttactaataacagtgttcactttattcgctggtcatcattaaagttgctaaagtgaaacttttgttcctcccacactgattcttggattacaaataactagataaatttcttacttgtatatttttcctttttattcaaaacataatgttatctacctattataaggaggaacaattatgtttgggaaaacagcaggtgaagcattagttgatttattaattgattggggagtagagcacatatacggtatgcctggagattccattaattctatcattgaagctttaagaaaaaaacaagataaaattaaatttattcaagttcgccatgaagaagctggtgcattagcagcggctgcctatgcgaaattaacaggaaaacttggcgtttgtatggcaattgcaggacctggtgctattcatttattaaatggtttatatgatgcgaaactcgataaagcccctgttctagcaatttcaggtcaagtagaaaccgatttacttggaacggactttttccaagaagtaaatttagaaagaatgtttgatgatgttgcggtttataaccagcgtattatgtcagcagagcaactacctgccgtagtgaatcaagcaattcgaatggcttatacgaaaaaaggtgtatccgttcttactattccagatgatgttccgaaatttgaagtgaaaaatggtgcccgtgttacaaatacttcttttactttgcctgagttgtttccacaaaaagaagatttagatgcagcgaaactcgcaataaatgaagcgaaaaagcctgtgattttagctggaaaaggaacaaaacatgcgagagaatctttacttgcattggcagaacaaattggtgctccaatcgtacttacattaccagctaaaggaattattcctgatgaacaccctctttgtattggtggattgggattaattggaacgaaaccttcttatgaagcaatgaagcatgcagatactttaattatggtcggtacttcttatccgttcaccggcttcttacctgaaaaagcaaaaacaattcatatcgatacagatcctgcccaaatcgggaaacgttatgcgacagatattggtttagctggtgatgctgataaaacattacgatggttaattgaaaatgttgaagaacacacagaccattccttcttagaacagcaccaagaaatgatgaaaaagtgggaagaaaaattacacgagcaagaagaagactcttccattccaattaaaccacaacgcgttatgcatgctctgcagcaagtagcacatgatgacgcaattctatcagttgatgtcggaaatgtaacagtatggaccgcaagacacttccgtatgacaaaccagcaatttgtcatttctagctggctcgcaacacttggttgcggtttacctggtgctcttgctggaaaaattgcattcccagataaacaagtatttgcagtttgtggtgatggcggatttggaatgacgatgaatgacttcgtaacagctgtaaaatataaattaccaatcgttgtcgtcgtattaaacaataataaaattgcgatgattaaattcgagcaagaagtcatgggtaatatcgaattcgaaacagatttaacgaaccctgattttgcaaaatatgcagaggcgtgtggaggtattggataccgtgttgagaatttagatgaactccttcccgctttcgaaaatgcagtaaaacaaaataaaccgtgtattattgatgtagttgtagatgctaacgaagcaccaatgccagcaaaaatcacatttggtcaagccgctggttatacgaagcatatgataaaagaattatttgaagaaggtaagattgatttacctccactttaaacgaaaaaagatagctgaaaacaatttgtcttcagctatctttttttatttttgtatctctttataaaaagaaaagtcattcatagttggttgtacttaagactcttattttttatcaagagtctttttatttaatttcgcttcagttaatactatgtaatactatgcatctaaaaatctttatacatctcgctaactatttcaattctctaaagttcggatatactttattttatgaatgtatcgcacatccacttatagaatttttctttctcttcaaattgtggataatgagctgatttctcaaaagtaataaattgtttttgatctgcttctatcttatcaaaatatgtttttgctgcatggaatgaagcttagtaggcaatggattttttaaatccttttctaataagacagtttgagaatgtgataatccaacgttataacgaattacgtctaacaagttatattcattacagaaagatttgaaaacatctcgcatacacatttttataaaaacacatagaaaagagcccttgctttcaacacaaggactcttttcataaactatttagctacctcttctttcggcattaccatacctttataaagttgaacagttatccagtaataaatgaaataaatgacaaagaagattcctattggcacccatacttttacaaacgggtcaactaatataaagctgaataagttaagccctactaatacgtgggaaatgccaatgatcgctgggaagataaataaatatgaaatttctttatatatacttttcgttaacatactgcgtctcacaccaatttttcgtaacatttcataacggcgtacgtcgcgagaagcacctgttaatattttgaacataagggaacttgccatcattgctaaaaaggcaattccgaggaaaaatcccataaacattgttccgctcatgaagctgttcataaactgataaattgtcattttcgtaaataagtctaccttttcacctgttgctttttcaatttgttctttttgtctcttgtctatttcgatcaataacggtttatattttttcatatcatctacttttgctaatgttacagtatgttctgttccttgaatccctttataatgctcttcgtctgcaatccttactggttttccgctaaattgattatgcgtaatttgtatctctcttacaactgcgtcttcccaatcctttggcatttgagggaattttgctaattcaggagcctctaaagctgaatatacaggttcagttaaaggttcagtcacacgtttacgaataggctcttttaaagtttttgtatcaaaatggtctgaaacaagtggtggtttcgcagttaagtcgttacgtaaataataaaccgcttctccatctactttatatttgtacttgctttcttcaacaatttccatttcttttaaggcagctttatcttgatcattcggatcatgaattacaacatcatatacacgagaaaagtctgtcataatacctacatttttttggaacgccatacctgccgtcatcgcacctgcgcctaatgcaattaacattgctacagtacctaatactctcgataaactatttactcgaaagcgtagctgtgcatatgtaaaactatttagaccagtttcatttcgttttttattccccttaattttcatcacaaaaaatgggagtaatgaactaaagataaaatatgttccaagtgttgtaacgatggttgctataataaaacctaattcagcataaatttttacattgatcataaaatagtaccctgtacttactagtaatacaccaagtactgtcattataataatgcgagttttacttttcttcacttcatctagtgtttcatcttcacgaattaactctagttcagtttttcgtaacaatcggacactgttcattatgccagtaatgaaaaataatattaagaagaaaatagctgtaactaaaattgctggtgtgtatacagatgcgtaactaccttttgctgaaatttccattccattcattaaaaagttccctgctacacttgcgagtaacatccctactaaaataccgataataatactgacaatacccataccgaatgtttcaataaataataactgtgctacttttttcttttttgcaccaagcatcatgtacataccgagttcttttcttcttaatgtgagcaagaaagagttggcatatataatataaaatacagtaatgaaggataatagtattgcacctacccagaagacgagccttatactactaattagactattatcttttgtaaattcactattcatcgccatcgtttggaacatgtagaaaatactaatactaataacgaggccaataagtaaaaccatataatcttttaacatctttttcatactatgacgtgataatttaaataacatagtttcaccccctacttagactcagcagctgagcccatatgagcgagcacacctaaaatgtcttgatagaaattctctcgagtaccttgacggtttaattctttataaagaagaccatcttgaataaataaaatacgctcacaataacttgcactaaatgcatcgtgtgtaaccatcaaaatacttacattgtgattttcatgtaaatcttgcatcgcttctaataaactttttgcgtttttactatcaagcgcacctgtcggttcatctgctaatacaattgctggattatgtactaaagctcttgccgccgctgttctttgcttttgtcctccagaaacagccgtcggatattttgttaaaatttcggtgatgcctaatttcttcgcaacgtcatttacctttccagtaatctcacttgacggtacgccttgcaaagaaagtggtaaagctatattttcataaattgataagttttctagaagattaaaatcttgaaaaatgaaacctaatttttgagagcgaaaatcagataatgcattgcccttcatagaagtaatatttgtaccagctatcgtcacactaccacctgtcgcttggtcaagtgtacttatcacattaagtaaagtcgtttttccagacccagaaggtcccatgatcccgacaaattctccttctttaatacttaacgatacaccccttaatgcttttgactgattctcatttcttttcccatacgttttttctacactttctacagtaactacatttgttgacatctctttcactccatcccttttgtataaaattaatttctcacatatttcttattattttgtcatgtgaattcttaagaattttttaattattcattcaagaagagttacacctgtaacatgaacctttttcctacttcatattctcatttttctacaactcgttccctcgatttcgcttacatttaccttacatttttgtaagataaaaaagaaaacacactaattgctaatagtgtgttttctttacaatcaatattttctattctttatttcctcttcaatagttgccacaaatacatctagcgcaataacttctgacttctcttccccatatttacgtacatttacagctccgttttccatttccttatcaccaataacaagaacatacggtactttttgcatttgtgcttctcttattttatatcctaatttttcatctcgtgcatcttgttcaacacgaactccagcttgtgctaatttatgtgcaatctcattggcatattgttcatgtactgcatttgaaactggaattactttcacttgaactggtgccacccatgctgggaacgcacctccaaagtgctcaattaatattgctaagaagcgatctaatgaccctaaaactgccctgtgaataacaactggtcttttcttttcattattttcatctatataatttaaatcaaatttctctggcatttggaaatcaagctggattgttccgcactggtggcttctatttaaagcatctttaatatgaaaatcaattttcggcccgtaaaatgcaccgtcaccttcatttagtctatatttataatttagcgattgtaatacattttctaatgccgcttctgcttgctcccataatttatcatcacccattgaatcttctggacgagtagaaagctctacttcatattcgaatccaaaagttttatatacgtaatcaatttgcgccattactgatttaatttcatcttcaatttgttttggagttacaaataaatgtgcatcatcttggcagaaagtacgtactcttaataatccgtttaacgcaccgctaaattcatgacgatgtacttgaccaaattcacacatacgaatcggtaattcacgataagaatgcaatttatttttaaacataagcatgtgccctgggcagttcatcggttttaatgcaaaacttttattatctacttcagagaaatacatattatctttataatgtccccagtgccctgatctctcccatacttcttggttcatcatgaacggagtgcgtacttcttgatacttatactctttttgaatttctcttaaaaatgcttccaattcgttacgaatcatttgtcctttcggtaaataaaacggcattcccggagcctcttcagaaaacataaataactcaagctcactgcctaacttacgatgatttctttttgctgcttcttcaacgaaatgtaaatactcttctaattctttttgagaagagaatgcaacaccatatatgcgctgaagcacttggttattactatcacctcgccaatatgcaccggaaacgtgagttaattgaaatgctttcaaataacctgtagatggtaaatgtggtcctctacataaatctacaaattcaccttgtttatatagtgttacactttccccactaggaattgcttctaaaagttctaatttcaagcggtcgttcatttcttgaaacagtttagctgcttcttctcgagaaacctcaactcgttctatctttatattttcatttatgatctttttcatttctttttcgatttttcgtaaatcttctatgtttacactacttggaagatccatatcataataaaatccattttcaataacaggtcctactccaagatttatatcaccatacaatctttttacagcttgcgctaaaatatgtgccgcggagtgtcttgcaatttctaccccttcatttgaatctatagtaatgatttccacttccgcattttcttcaatatttcggcgtaaatcatataatccatcatttactttccccgcaactgctttctttttcaaactactgctaatggatccagcaatttcttctaaagtaactccatttacaaattctttaacgctaccatctggaaatttaatttcaatcatttgttctttcatttttcatctctccatttcataataaaaagcacactcatccctaaaatagggacgagcgtgcttttacccgtggttccacccagattcccattgtaaacaaacaatggcttcttttacggtaacgtcgtttatacggcactagatacttaatttccccagtgcagctctaaggtggtaagttatttttctgcgttaggaagttctcagctttccttccttctctgtataaccgggtaaaataactcgtgtccttttcttcgcttattatgaaattgaatgcaaaaaagcatattcatccctaaatatagggacgaatatgcttatatccgtggttccacccagattcccatcacaaaaaaacataatggcttcttttgcgataacgtcgcatacacggcactagatacttaatttccctagtgcagctctaaggtggtaagttatttttctgcgttaggaagttctcagctttccttccttctctgtataaccgggtaaaataactcgtgtccttttctttgctttttataaaacatccatttattgttatttaatatatcttattcattttatttttgcaagtgtttaaaaaaattatttatttaatttaaaaaagtgaaaccaaatttttttggtttcacttcacaattttaccaatcttgtggttcgtaatttaagtctgcaaatagacgtcttttctctttcttcgttaaatctctccactgcccaactggtaaattattcaattcaatattcataattctcgtacgttttaacgtgtatacttgataacctaaagcttcacacatacggcgaatttgacgatttagcccttgtgttaaaataatttggaactcatattttgataactgtgtaatctcacaaggaagcgtttttgttcctaaaattttaacacccgctgccattttctctaagaaatcaggtgtaattggcttatctactgaaacgatatattctttctcatgtttgttttcagcacgtaaaatctcattaacaatatcgccatcattcgttaacaaaattaaaccgtcagagtctttatcaagacgtccaatgtgactaattcgtaaaggatgattcactaaatcaataatattaccttttactgatttttcactcgtacatgtaatacctactggtttatttaaagcgatatatacgtgatctcgagcaattcgaagctgctctccatttactcgtacatcatcacctgggttcacttggtcaccaatttttgcaaccttaccgttaataattactcttctctcattaattagtttatccgctccacgtcgagacgcttttccagcttcactaataaatttattgatacgcaaattaggcacatccttttctaaaaaaatttcaagctcacactgcttctaccgtacaatacaaaagggtaagcctcctattataacttaaatatattaacatgaaagggtatataacgtcttctattaattacttgtttataagaaaatatctttattatacattcatttatgcactttttcagcgtttaatatacaagccattcttccttacatacagcttgttttccttttatctcttctatctcttcatgaatattagctaatttatataaacctgggaaaatctcttccacataatgttgatgcgtcttttcatctttccaatacgttaacactatgtaacgatttttattttttaaagacttcccaactactccacctaacattccttttgctttttccattcctttattccaaattgtttcttgcttatgtaaaaaatgattttccttttccatctttacatcacatatagcaactcttacgaatgatccttctgtaacaacgtctttcaaatgcgtatcagttatatcatacaacgtttgaaataattcaatttcacatgaaagaaacgtatcctcttgattactatttaaataaattgtatcgtgagcaccattcataaatgattgatatgcacttctatcttcccataaagtaaatacacatgcctcatcttcataccatccaccaaattgtccatgaaacccatctaggtgccgtatatcacgccattttccttgcgcatttgaaaacaattcctttttctcttcttccaccttacagtagattgtttttagtagcatttttaattccccctttagcatataatttatcttcttctcacaataattagttcacataatatttttataatcaccctaatactctttatagacatatagaactaatcatatttatcactacatctatcgaatttaatttcaaatgattcagaataaaaaaagatgtaactcttaatgaattacatctttagctaatctcccttattcatctttttctcaaataaataatacgtaatgtctcctggataatgtactactgttaccttccgctccccttttttaaaactaacagtatgcccgttttcccctaagttctcccatccactcgcctttgtaatcggcattacacttatatattgatagtcctcttccttatcatcgttaatatgaattgctgacattggtactggaaaacctttaattttagattctttattcataaatatgaatgcaattacaccaactaataacatagccattgaaatacttgaaactagttttcttctattcattttcactaaaaaccctcttttctcacatataactttcatcattttactaactttaattatttatgtatagagaagaaataattttaattatttctaacctattttctctacttaaaacaacattattattatatattataattataagtttttaaattttggaggcgttacatattgcagaaattactttttactaaatggacagttgttatttctattttcatcatttttggtacaattttctacgttactaatgttaaaaataaccacgaaaaagcaactgtagaaacagcggagacaaaaactttcaaaactaaattacaacctaaaattaatgaattgactactcattataatgacatcatcgaaaaagattggttacctgcctgggaagagattaacacgaatggagattcagtagatcgaaataaactattagttacaatgagtgctgtttccaagcagtacgaaacaattatgaacgaaatagacacgcttaaaattgaagaaaacataacagatatagatatacaaaaacaactacttcagttcacaactcagtttaaatccgcatcaaatttcatgaaaaatgcagcaaatttaattatagacggagcaaataactctactccaaccgatgaaactattgaaaaaacaaaacaagctttaggacttgcggatcaacatattgtcatcgctttatctactttaaatgaagttgaagataaattaggacttacaaaaaaataaaactatttactattttaaaataaaaaatgattgcaattcacaatttgtatgtctataatatttttattgatttacaatcaatgtgtttataaattttataattcggatgaaccattcaggagaaggtctattgatctaccgacggggcaaaaagttgttataccagctttgaaactctcaggtcttggttacaagtagaactgcatggggacgaatctctggagagactccctctcgctttcatagagcgcggaggaaaacgagcaccgaaggagcaaatccgctactatagcggataatctctcaggtaaaaggacagagacaagcgaaagaaaatgccgatttgtatcggtttatttttctatcccttgtttctccagagaccatttcatttacttgaagtggtttttattttttctaaataaaggagaataaagatggagacagtaagtaaagtattagaacaaatgaatcaatacgtgtggggattaccaactttgttgctactcgttggaacaggtatcattctcacagtgcgtttaaaaggtttacagtttagtaaactattatacgctcacaaactagcatttaaaaaatcagaagatacctcttcttctggagatattagtcacttccaagcacttatgacagctatggccgcaacgattggtatgggaaatatagccggtgttgcaacagcggttacaattggtggtcctggtgcaatattttggatgtggattaccgctttattcggtatggcaacaaagtatgccgaggcaatacttgcagtaaaataccgtgttagtaatgaaaatggtgaatattcaggtggaccaatgtattatttagagcgtggtttaggtaagaaatggctggcagtattattcgctatattcggctcaactgcttctttcggtattggtaatatggtgcaatctaactcagttgcagaggcaatgcgaattaatttctctttccctcctgctttaactggtatagtaatgtcatttttaatcgcaattgttattttaggcggtgtaaaaaaaattgggaaagtgacgggatatgtcgttcctattaaagctttcttttatataattgctggtcttataattattttctatcactacgaccaaattccagaagcattttcacttattttttttggtgcatttaatggtacagcagctgctggtggttttattggggcaacagttgcatcagctattcaaatcggaatggcgcgtggtgtatttgcgaacgaagctggtttagggagtgcccctattgccgcggcggcggcaaaaactgattcgcctgcaaagcaagctttagtttcaatgactggtacttttctagatacgtttattgtatgtacaattacaggactagtattaattactacaggtgcttggagatctggtaaaactggcgttgaagctacaacacttgcattccaatctgtatttggtactgctggtagtatgattctcggtatcgcaattattttatttgcctactctactattttaggctggtcgtattatggagaaaaatgtgtagcttatttattcggagaaagtgcagttaaatattataaagcaatctttattgttatgattgcaattggtgctaatttaaagctaggaatcgtatggacatttgctgatattgcaaatggacttatggcaattccaaacttgattggtctaattggattaagtagtattgttgttgctgaaacgaatcgctttttacaagcagagaaattgaaagaaaataataaaaaacaggcaagttaatctatgaaaaaaggaatgactcatacatgatgagcgttccttttttcatcccctcttttacttaattactatcattaaaaatatatttatatcaatatttactcctttttattccttcaaaagtttttcacataaatgtcataaatcgtatggtttaactatatagttgaaaaggaatgcgacattaaggtgtcactgaaaaactcatccaagaaaagggaggaaaaatcttttgaaaaacaaaatcatcgttttcctatctgttttgtcatttattattggtggtttcttctttaacacgaatacttcaagcgctgaaacatcatctactgattacgttcctaaccaattaatcgttaagttcaaacaaaatgcatctttaagtaatgtgcaatcttttcataaatctgtcggagctaatgtcttatctaaagatgataagttaggttttgaagtcgtacaattttcaaaaggtactgtaaaagaaaaaataaagagctataaaaataatccagatgtggaatatgcagaaccgaattattacgttcacgccttttggactccaaacgacccatattttaataatcaatacgggttacaaaagattcaagctccacaagcttgggatagccaacgaagtgatcctggtgtaaaagtagctattattgatacaggagttcaaggctcacaccctgatctggcttcgaaagtaatttacgggcatgattatgttgataacgacaatacatctgatgatggtaatggtcatggtacacattgcgctggaattactggagcacttacgaataacagcgtcggaattgctggtgttgccccacaaacttcaatttatgctgtccgcgtattagataatcaaggaagtggtactcttgatgctgtagcgcaaggtattcgagaagctgctgattcgggtgcaaaagtaattagtttaagtttaggagctccaaatggtggtactgcattacaacaagccgttcaatatgcatggaataaaggctctgttatagttgcagctgctggaaatgctggaaatacaaaagctaattaccctgcttattacagcgaagtaattgcagttgcttctacagatcaatcagatagaaaatcttcattctctacttatggtagctgggtagatgttgcagcaccaggttcaaatatatattcaacatataaaggaagcacgtatcaatcattaagtggtacatctatggcaacacctcatgttgcaggagtcgcagctcttttagcaaatcaaggatatagcaatacacaaatccgccaaattattgagtctactactgataaaattagtggtacaggtacgtactggaaaaacggtagagtcaatgcatataaggctgtacaatacgctaagcaattacaagaaaataaagcttcttaagaaaactttaatcagtcgatctaccatgaatgcagaataaaatagaaggagagacttctataattaaagcctctccttcttacaaactatattactctccctgctttttaaccatatgtaaatacagtacaaaatccatcattgtcgatgaatgaccaagttgacgaatcatcgctgttatatttcctctatgatatgtaccatgatttacgacatgttgcactaattctaaaatcgaagtttctaatttccctacgtatggattctcaataacaaatacagcattcacatcttgtattgtaattaaaaactctttatattgatttgccatgttttcaaacattttttctaattcatgtaacgatttagtttcaatttgttttcgtaaatcttctcggtcttgtattgcttcattcatacttttaccatgcaatatatgtaaccacacttgatctgtaatataaatatgcacaaaagtatccttaatggatgggaatacactctgtatctgctcattaaaaattgtctcatagtttggtaactcttttaatcgattgaataatctagtattagcccaagcatgataatcacactgttttaatatatactctttcaatttatattacctccttattgtatgaaacgaatggtttgtttcttcatttctgattctctatcagcctttgcaatccctttttctttcatttcatgcttatttatcgttttatattttacatacgtataaaattccgtttgaaatggaaatggtgtaatccgaattgtttcctcgtccacccattgagcttgaataagtttctcctctttactattaaacatttctgttccttcaaaaccatctttaaataagtcaatttcatctttctttttgacaccaggcttattcatacatacgtataaagaaagttcatcacaaaactttaataatctataatgcttatcgaacatcgcaaactgttcctttgttaacgttttcaaaattcttttttgtcgttctaattcatgtttataaaatgacatcatctcttcatcttcctcgtttagtgggaatgataaaaaatgtttactacaaagcaatgccccgtatggattagaattttcaatttcattcaatccaatcgtataaaaagcaaaacgtaatgggcttggacaatccataaatgtatatggaatatttttagcatcattcaaaattggtactttatcaagctctatccatcctctgtcatgctcatatattgcatcaactgtttcttttaaatatgttttatcttcaaaaaagtcttcttttatatgctttgcaatctctccagctaaaaaaccatgatcatgttgacgaattaaaatactttccttctcatttttttcacgaaaaatcattcgtatactccccctcatcctcatattaaagctttttatatgcatcgattcttaattaatccctaaataatagaagggattcagtctcttgcaacgaaattaacataattatatagtattctttctaatcatagtgatagctttatctttactatctattatactaaaacattcattccaaaaatttttttatgaggtgaaaacatgaacaaaacagaattaattaaaaacgtagctcaatcagctgatatttctcaaaaggacgcttctgcagctgtacaatccgtatttgacacaattgctaatgcattacaatctggagataaagttcaactaatcgggtttggaacttttgaagtacgcgaaagatctgctcgtacaggacgtaatccgcaaactggcgaagaaattcaaatcgccgctggtaaagttcctgcatttaaagcaggtaaagaattaaaagaagctgttaaataaaaacaagaaaccagccattttataggctggtttcttgtttttatttaagtaattgctttatattctctgcatgatacacttcacaaatataaaatacacatttgcagttacttacaatttgatactttctagttggatacacattcgctgtaacagaacatccatcaaacaattcaataatatttccagatggctgatatccttcatataatacgtttcttcttacttccatcttttctataagcttttcaacaggaatatttccactctctaattcactctttattgcgtccggtaaaaacgaagtgtctgcaaaaattagattttcagataacacctttcctttataactaacattagatacacggtaaagaaatgttccatctttatcaaaaaaattctttgcttctttcggaatgtactgtctaccaagtgcctcttgttcaagaacatcaaactgaactgtatcatttaaaagcttttctaaagcatgaatggatgatgtatctccagaaaataaaatatttttaattgcttgtacattataagtgaattcattctttctattttccgctactaacatgaggaacacctcttctgtaatttttttatttaagatttaaaagtgctgccgcgtctaattgcgtaatttcagtcacttccttactgaatattgcaacagaagccctataatctaaactaggccttacatcttccatcattgtattacttgctaactcttgtctatccttaaaaaccaacaagtttggaggatcatttggagctgatactgtaatatgtactggtggaatcattagtccttcacctgtcgctttcagcaccgcttcttttcgagtccaatatgttaaaaaaccttctattttctgttcatttggcagtttcataacttgcgctatttcaatgtctgttaatacaccttctgccattttcataacatctatacttggattcatttgttctacatctatgccaacaggtgcagattttgtaaatgcaacgacaacccactcacctgaatgcgaaacggataattgcggcataccttctggtaattgtggtcttccatgctgcaatttacatactgagcacattcgatcaattggtacttggactggtgacatagaaagtatcttgccgagaactaatctacttattacgcaacctattataaaacgagctcgatctgccgaatgatgatacgaatttgctttctctcgctctatatcatttagtaaattgtaatgccatgattgtaaatccgaaattcttgcccaccatatttgacaatcattctcattcaaagttggaatagaatctacaactttactttctatcatgtaaactctcctttattcaacgaatatcaattttcataaaaaagcatacgtatattgttattcattgacaagtactttctctttttctgatacagataatgttttttctttcttctttgacattacctctttatcggaaatacgtaaagaaaatagtagtgctatgagcaaaaatattgctgacccaattaatgctgcttgatatggtaaaaaatcggattgaacgttattacctccaaaaacagctagtatactagctaaaaacgctactcctattgctgaacctagtcgattttgcacattgaatatagtagtcgctctccccatagaaggcggcgtgatattgttaaaggcagaaaattgaaccgcaccgacagattgacctaagaaaataccgataccaaacaataatgcccggatttgccacggattcgtatcgtgatttacaaaactcaataaaacaaatataaccgccgtacatattaatccaatagaaattacctttcgagctcctaatttcttatatgaccatggtacaatttgtgaagaaatcattaatccaatcgcctctggaaatgtcgtaagtcctgattccagtgcagaaactcctatcacattttgatacataagaggaaaaacaaataacattcctaataaaccagctgatgaaaataatgatataatgctcatctttctaaagactggttcttttaataagcgtaaatctaacatcggttgctttactttcagttctacaattataaacaatgtaatgaatacaaccccagctatcccagtactcataatttctggagaaatccacccttttgatggtccctgactgagtgcatatatgagcatcgcaaatcctggtgctgataaaataaagccgagcgaatcaaagcgaccagctgatttttcaacatgttctgctaaaaatagaagtccaaatagcaatgcaacgattccaaacggtagattaatataaaatgcccaacgccaagacatttgatctacaaagaaaccaccgatgataggaccaattgctggtgctacagcaattggaagtataatgaaccgggaaatcttcggtctttcctcgggtgaaaatgttcgaaataacatcgccattccaaccggtgttaaaagccctccgccagcaccttgaataatacggaaaatattcaatgaagtaatatcgttagccattccgcataaagcagatgcaattgtaaatacgaaaagagcaattaaaaatactcttttcgtaccaaaacgatctcctaaccaaccagaaatcggaaggaaaacagctaaactaactaaatacccaacattcaccgtccccattgcagatggaggtacttgtagttctctacttatcgtttgcagtgctacatttacaatcgttgcgtccatcgcagccataaacatcgcagttatataaacgatacttacaactacttttggatttagtttttctttcattatcgttttcctactaatgttttttcgcgaacttgattaccttgtggattcaaatctttccagttatattcaacatattctaagcaactctgcctactagcttcttcatatacgacattccagccaataggtacatcgagaaaagcaggccagagagaatactggccctcctcatttattaatactttatatgtgtaattatcattttcaaatggattcgtcatactctacttacccctttcttattctgcaaatatttcgctaatacttgtccaatttccgtaagtggacctggctgacatagatctttatgtctacaatcaacatcgtgctgcacaatttgcccatctaaataatttaaccacgtatttggagaaataggatcaaaccagtctggtataacagtagatctaaagaataagatatctccgttataaactttcggtacatatttccctaacaaccctactgaatttacatatgtttctttcaagttcaatatagtctcttcttcaagacttgctaatgcacttccatctttacgaaggatttcaactgcactttccattgtaagtggtttaccatccatgttatctgggtcatatccgcctaaagcaagtaatgcgattaacgcttcctcttcagtaggcgcttccgtattcggtaagaagtgtccaggataagaatcaagcataacgagtaattctacttcttccccttcattttgtaattgcgctgccattgcatgcacaacatttcctccaagcgaccaacctaataaacgatatggtccatgaggctgtacttcacgaacgtgtttcaagtaatccgccgccatctcctctaaactttttggaagttcttcatttttagcgataccacgtgcttgtacaccatagattggataatctgttcctaaagatttcataagtcctgcatagcaccaacttaatccacctgctggatgtacacaaaatagtggtaattgatccccgcttgctcgtaatggaagcaacacatcaagtgcactttgaccattccccatctcaagtctttcagctaaccctgcaacagtcggtgctgcaaataaagtgccaatatttagttccactccaagcgcctctttcatgcggctcataagctgcactgcaaggagtgaatggccaccaagatcaaagaatccgtcatcaattccaatttgaggtacacttagcacttctgtaaacaagtcacataacatttcttcttgcggtgttcttggaccacgactagaagatgatgcgataaattctggagctggcaatacctttctatctaatttaccgtttggagttaaaggtaactcatttactactacaaaagcgtatggaaccatataatctggtaaactaccactagcaaactgacgcatttcattcgtatcaatcgcttcattatttgatgcaacgatataagaaactaaccgtttatcccctggttgatcttcccgtacaataacggctacttgctcaactttagggtgcttcattatgactgcttctatttctcctaattcaattcggaacccacgaattttgatttgatgatctgcacgtcctatataatctagcgtcccatctttacgccagcgagctaagtctcctgtacgatacattcttgtacctggcttgccaaatggatctgcgataaagcgttcagccgttaatcctgctcttcctaaatatccacgcgcaagccctgcacctgcaacatacatttctccaactactccaggtggcactggttgtaaatagttgtctaacacatacactttaaggtcaggtatactgcacccaattaaactatttgctcgtaaagagacgatagtttcatctaattcaatataactaacatgtactgtcgtctccgtaataccgtacatattaataagctttggtgcgttatgaggatgtcgactataccaatcttctaagcgacttagctcaagtgcttctcctccaaaaacaacatatcgtaaagataatttttggccaatctcttcattttcacgatctgcttgcatcaattgatagaacgctgatggagtttggtttaaaaccgtaaccttttctttaacaagaagctgtaaaaattctttcggtgagcgacttacagtatgtggcactacaactaaacgccctccgtataataaaggtccccaaatttcccaaacagagaaatcaaaagcgtatgaatggaacatcgtccaaacatcgtttccgtcaaactggaaccaatgatcagttgctcctaaaagtcttactacattttgatgaggtatcataacgcctttcggtctacccgttgagcctgacgtataaataacgtaagcaatatgtgatggagataatggcttaatgcgttctacttcatcaatattttcttcactatatttctcaacttctgctattacttttacatcatcaactaaaacttttagtgcctcatcacattcaaattccacttctgaattcgttaaaacacatgttggtttcgcatcgtgtagcataaatgaaatgcggtctgctgggtaatctggatctaacggaaggtatccagcaccagctttaagaacagctaataagcttacaaccatgtttaatgatcttggcatcgctaaagcaacgagttgatcaggaccaatcccttttgctattaggaatcgagctattttatttgcttttctatttaactctttataagttaatttcttatcttcaaagacaacagcaatagaatttggatttatatgaacctgcttttcaaacaattgtggcaatgtcatttctggtgcaatttgaaaaccaccattccacttttctaacactgtatttttctctgctacagttaatatttctaatctgccaattgattgatccggatttgtagctgcatcatctaataacaaaatgaatcgttctattagtttttgaaccgtttcacgtttatataaatcggtactaaactctagtaatccatgtaaaccgttcggagtaccatcaaccccgttactctcactaatttcaaatgttaaatcaaattttgcagaaccgacgctttgaatttcaaggctcgcttctaaacctggtacatgaaacgttgcttctggtgtattttgaaaagctaacataacttgaaacaacgggtggctgtttcgagtacgtactggatttaacacttcaacaagcctttcaaatggaacatcttgattttcataagctgcaagatttacctgcttcactctatttaataattctttaaaacttggatctcctgacgtatttgtacgtaacactaatgtatttacaaataaaccaacaatatctgaaagtacatcatcatttcttccagcaatcggacttccaattggtatatcagtgcctgcacctaatcttgtaaatagtgcactaagccctgcttgcaataccataaacaaactaactccatttttacgtgcaagctctactaacctactatgcataccttcatctatatgaaaatgaattgtttccccgcggtaactcgtctcaattggacgctggaaatctgtaggtaactccatttggtctggtaaacctttaagttcttctttccaaaaatctaattgtgttgaaataagactctctggtgtcgtttcatcacctagcaattgctgttgccaaagtgcataatctgcgtattgaactggtagtgtctccagctgaactctgtcaccttgacatcgcgctttatacgacgctgcaaagtctctcgttaacggctgtaatgaccagccatcacctacaatatgatgtaataaaattaataatacatgttcgttttcactcactgtaaaaagttgtaaacgaactgccggctcaaaatcgaggttaaagctatatcttaccgcctctgaaagtacactttctaattcatctttacatgtattagttataaccatttctagatttaagttttccatatctaaaattctctgataggaactacctaatacgttagggaaaattgttctaagtgtttcatgtttctcaactacatcataaaaagcaccttgtaatgcttcccgattcaatattccattcatacgaatgactagcggaatattataagtaggacttggaccttctaaacaatttaagaaccataacctgcgctgtgcaaatgaaagtggaacttcatttggcctacttgctttctgaatagctggtcttgcactttttgcatcgtttaattgtttcgccagttcggcaacagttggtgattcaaatagtttcccgattcctaattccacacttaacgtttcacgaatccttgccattaaacgagatgcgagaagtgaatgtccacccatttcaaagaaattatcatcaatgctaattcgagaaacaccaagtacttctgcaaataaatcacataatatttcttctttcggatttctagcaactctctcattgtgcattccattaaaatcaggagcaggtaatttctttctgtcaaccttaccatttggcgttaatggtaattcttctagcacaacaaatgccgatggtatcatataattcgctaaactttctgaaacataagaacgaatttctgaaagattaatcggttccttttcttctgcaacgatatacgcaatgatgcgtttatcatttggacgatcttctcgtaccattactaccgcttgttgaatattttcatgtcgttgtaataccgtttcaatttcagctaattcaattcggaatccacgaattttaatttgatgatctgcgcgactaatgtactctaacgcaccatcactacgccatttcacaagatctcctgtacggtacatgcgcttccctgattctccataaggatttgcaataaaccgttcagctgttaactcaggttttcctaaatatccgcttgcaagtccctcccctgcaatatataattccccaataactccaggtggaactggttgtaaccctgcatccaatacatacacttctgtattgcaaattggctttccaataggaggtatacccttttcaccttcatcaatgttcataaaagtagaccaaatcgtcgtttcagttggtccatataaattagttattgagcaacctaattcttttaatttatttgctaaatgcgctggaagagcttcaccaccaactagtatatttagcccttgtagcttctctggataatcagttactaacgcctgccaaagcgtcggtgtagcctgcataatggtcactctttcttcttgtaaaagtgtcgttaatgctgatggctcttgtatgtcttctttttgcgcaattgttaaacttgcaccactaataagaggtaaataaatttctagagcagaaatatcaaacgcaaacgttgtaactgctaataaatgatcattttcatttaatgaaaacttttgttgcatagccattaaaaagttacttaaacctctcataggaacaattacaccttttgggtttcctgttgagcctgaagtatatattgtataggctgggtttaaaagtgatacatcattcttacatgctatattcatacgagaatatgtatgtaacgctagtttcgtttcttcttcatctaatacaatttttttcatatcattttctataactaacttagatgaaacagatgaatatgttatgatacaaactggttttgcatcatttactatataattaattctttctgctgggtattctggatctattggtaaatacgctgcaccagcctttaagactgctagcatactaactaccatttctattgatctagggaatactaaagctacaaattggtttggtcgtattccttcttctactaaataatgtgctagttcattcgctcgttcatttagctctttatacgtaaggtttacaccgtcacaagtaatggctagtttattgggatttttttgcacttgtttttcaaatgatataggcagactgattaactcatcgtcttccttcgtttcattccattccaataaaactttatgattttcttcaggcagagtaatgtttatttttccaatcgactcgtttttctcataattatttactactaattcaaatagactcataaatctttctttatgcaatgctagctccgcgccattatatacttcaggatttgcatcaaaatgaatcattagctcattttgatcaaaacgtttatatacatttattgataaatcatcgacaggtcctgctgataaattatgcgtaataccacgattcccagcaaaatttagcccgtaatcaaaaggtataacattcactaacggtccaaacaacctttgattttcacctagtaactttaagtctcttcttaattcctcatgacggtatttataatggcgacgtacatctcggatttctttagaaacttgctgcaataattccgcaagagttatatttggagttactgtaatacgaagtggcactaaattcattaccatacttggtgtatgaatagataccgaacctagacgtcccatcatcggtaaacctaaaacaatatcatttgcacctgttaacttatgcatataaatacttgttacagcgacaatgaattccggccaacttgttaacgaaatattgatatcttctaataaagttttcgtgctagaactagataaataagctgtttctcgtgaaaatccatttgatgttctcggtgctcgctctgccaagcttacaacttctggttcatccgcaaatttttctaaccaaaaagtacgatcttcctgaaattttttagactcacgatactcaatatcttcttgcacgacttttgtaagagaaccaaacggcttttcattcttgtttgtttcttctataagtgatgtatactcattcgccactttttggctaagaagtgaaaatccatagccatccatcacaatgtgatggatgcgctgataccaaaagaaacgattattttcaacttgaataagtgcttcagtaaataatgtatcttttttcaaatcgactggcatagataaatcatttttcatccatactttagcagcttcttcaggattttcttctttacgaacgtcaataaaatgcatatgaaactgtgattcttcaataacttgccatgcgccaatttcatcctcctcgaagcgaacatgaagtgcttctgcttccattacaactttacgtacagctaattcgaaaatttcttgatgaatatttccgtttatttctacatattccccagtattgtaaattggattaagcggatctaattgttgcgcaaaccacataccagactgcgcagatgataacgaatgacgaatcttttgactgttaggcattctttactacccctttattatgtagtctatttgttacagcacctgtgctgtttgtgaagatagtaaactgtaccaacctgcaacagttggacgttctgctaaatgtgcaaaagtgatttctttcccttcacgacgccacttctctactaaactcataattctgaccgaatcaagccctctatttaataagtcctcatcaatatcaatactctctactggctcacgaagtagttgtgcaactagttcatgcacttcctgtatagtgattccttcactctcatcatcttttacactttgtaaatcgtttaacagtaggtttgttgatgtcgttactgcacatctattagatgcatacttcaatgcttgtttatgatgctctagtgaaaaatcagcaactgcatctgctacaaagaacggctctataccatccataaatgcttcacaagctgttaaaagacagccaatatgcgcataaataccgcaaataatgagttgatcttttccttgttcatttaaaatttctaatagatttgtctttttaaatgcactatatctccattttgtgaggaatatatcatcctcatcaggagtaagttcatcaacaattttctttttatctggtccagcaggtataccgtcaccccaaaagtcttgtaataaacctcgttgttctaacgtttgcccaccaggttgtgctgtataaacaactggtataccaagttccttacatttttctcttatcatttttatatttgaaataagttctacttttggtgattctttatcgctatatgcatcaagaaaatattcttgcatgtcatgaattaaaagtactgcacgtttcggatctggcgtccaattcactttattttttggtagttctgattcaattggcattttatatactgaaatagatgggatagccatctaatcacttccttccggtttttattattgttttactgtaataagcttttcagcaatgactttacgtagttcttttttgctgacttttccgactcctgtttgcgggaatgcttcaataaattcaattcgatctggaattttataagccgctataccacgttctcttaaaaacatttttaattcacttactgctggaacttgtccgcgagctataacaaaagcacaggtgcgttcacctaaataatcgtcaggcatagatacaattgctacgtcatggaccgcatcgtgtgctaatagatgattttcaacttcttccgcagcaactttctcaccaccgcggttaatttgatctttatctcttccttctacaatgatgtatccttgttcatttacttttacaagatcacctgtgcgataaaatccatcctttgtaaatgatcgtgcattatgctcttcggctttatagtaaccacgaattgtatatggacctcttgttaataaactacctacttcgccaggttgtacatcgttgtcattttcatcaacaactcgtacttcatcgagtgcagacattggtctaccttgtgtataaataataaattcttccggatcatctaatcttgtatagttcactaatccttccgccataccgaacacttgctgtaacgtacatccaaatgtaggacgtatacgttttgcaacctcagcgctaaacttagcaccacctacttgaataatctctaggcttgataaatcggcattacgagaagatgcagcatcaagccaaatcattgctaatggcggaacgagcgctgtaattgtaactttttctttttcgataagagcaaaggcctcatctggactaccaccagttgccaataccacttttccacccgcatagaaagttccaaatgtccctggagaactcattgggtaattgtgtgctactggaagaactgccatatagacgctttctgcattcaaattacaaatttcagcgctaacacgtaaactataaatatagtcatcatgtgttctaggaattaatttagaaagacctgttgtgcctcctgataattggagaaatgcaacatcacttggctgaacttctggtaatgagacgggatccatatacagatcatttatgttcacaaactcttcttcttctcccactacaattacatgttgtaaagttggcactttctctttcacttctcttgctaattttcgataatcaaaaccgagagccttatctgaaataacgtaagcgctcgcctcgccaaactcacaaaaataactaatttcactgcttcgatgtgaaggtagtgcaaagacaggaagcgctccaattcgaaatagtgcaaaacatatttcgaaaaactcgataatgttaggtaactggattacaactctgtcctctttctttattcctaaattcagtaaacctgctgctaaacgatctacctttttattaagttcactatatgttatatgcttcttaccacttacaaccgcgattcgatctccatatttctcagcccgctctcttaacactcctccaaatgtttcaccaagccaacatcctgcttctcggtaacgatcggcaaattcttttggccattctgtataacctactagcattctttcttccccctatttttcattaagtgaactatctcttaaccctaaagcttttagcattgtttggaacttagctgatgtttctgctaactcatcttctggttttgactcagcaacaactccagctcctgcatataaacgaagtgtattttcttgtacttcagcacaacgaattgtaacaatccattctccatctccatttaaatcgctccatcctagcattcctgtaaagaactcgcggtcaaatggctcaatatgctgtatagcttctcttgctttttccatcggagttccgcaaactgctggcgtaggatgaagggcaattgctaattgtaaagaagaagtatttggatccttaagttcacctttcacttctgtagacaaatgccacatcgcttcactatgaataactgatggcttttctggaacatgtaatgtatgacaatacggacgaagtgcagcggcaaccgcttcaactactaccgcatgttcatgtaaatcttttggcgaagaaagtaattcctctgctcttcttttatcttctactgggtcctcactacgtggccttgaaccagctaacgggttagaaataacttgcataccattacgtgaaacaagtaattcagggcttgctccaattagcgtcttactgttctctttttcatctttcggtaaatttacagaaaatgtataaccatgcttattatgctctgctaattctcgcagaagtttttgcttatcaatcttttcggaagatttaacatctaacgatctggatagaacgattttctttaaatcaccgtcctgtattttttcaattccttgcttcacaccattcatatatacttcagggtctggcactggtgtcatttcaaatgttacattctcatttgtttcaagctgatttgttgtatccaattgtaaacgctcagaaattctgctatattctggtacgatgagttggacttcttttctacgatcaaatggcaaagcacccacaacgataggatttggatttccagcttgtttcgcattacttaatttcgcttgaacaagctctgggaaactttcaatttcacgatgctttactgtagtaaactctccttctgctaatatcgttcgagttggtgaagcgaaaaagaatgaagattcagtcttataatcttctaaaagtttttctgacaattcctttacagctatatgttcattcataatataataacctcctgaatttttattaaactcctaacgtagcaccgccatcaacacataaattgtgcattgtaatatgacttgctctatctgaggctaaaaataacactgcttcagcaacttctgaaggttgtgcaattttttgtaatggaattccgagtctatatgtattttgagaaccagcaattatatttttagctccattctcatcagcccatagtaatctttgcatctcagtttcagtagaacctggagaaactaagttgcagcgtatattgtatgccgcaagctctagtcctaaacatttcataaacatcgtcgttgcggcctttgacgcagcatacgcagccatctccattcttggcgtatttgccgcatttgaaccgactgtaacaattgcccccgattttcttaacatcatatttttacttaccgctcgggacatattgaaaacccctgtcgtatttacagagaatgttttattccaatcttcatcacttaacgaatgaattggtcccatacgtaaaacccctgcaacatttattaaaatatctattggcgctatttcatttgcaatatgatttaccatgtcttcagcagcggcgctatcactcacatctaaacgaaacgttttcatacgtgtattgtttaattcattttgatttaagagtacatttaacccctcttcattttgatcaaccgcaataactgtggctcctctttctaaaaacattttggcaacgacactgcctatgccttgtgctgcacctgttactaaaactgttttcccatcaaattcccctaagttcattttctctatcctttcacataaacattaatttcattaagtaacaccgatgatattgattttcattatcagttgtgttgtaaaaaataatacacttactaaactaattggtcaagtgcgcattactttaaaatccattttattgataatgtttttcatttaccatcttacaccgaaatgataatgtttctcaataaacttgtcaatctttttttatttttcagataaaccattttaatgcttcttaataaaatcatatgtaaacgcattaaaagtacttatattataaataaaattcaaagtcctctttttaaaattgaagaaactaaactagagatacgttcatttacaatgctttatgaaaaactcaagtatatattttctcaatatttttctgaaaatatatcttacaaatactaatgaatgtcttttttgtcatttaagatttaatatatatttcgaatacgatgtatcaatttattgtatttcaatataatccaaataggcatttcactcacttttacatctatgaaaatcataaaagtaatttaaccttgttaaaataactcataaaaaaagcatcctaattaatagaataggatgctttttcgtaatcatattgttatagaagatttatatacttatgctacgctgcgatactcttcttctttttcttttttctgcttaggtgcttgaattaaaattgcgataatgaatgacacgacacataatacacctattaccatgaacgttggtttgaatccacctagaagtgcaccgataaaggaacctgcaagcgccccaaatccaaatccttgatacacaattccgtagttcttactatggtttttcataccgaagaaatcaccaacaatagctgggaaaatagtgatatttccaccaaagcaaaacgctacacttgctacacatacgaagtaaataccataatttaaatctacaaaacttagaactaagactgaactcgccataacaacaaaagtaccagtaacgatttttaaacgcccaattttatccgataacggtcctaaaatgatacgacctaacgtattgaagattgcaaccatagccaccgcattagctgctgttgctgcgctaagtcctacaagttgaacaccaatgtcttttaccataccaattaagtataagccactcatacatgatgtaaataacatgataaataataagtatacttgttttgtgcctaacatttctttcgttgtgtattcctcagtttttgtttcatgaactgctccttgatctgcagcttgatggattaaacaagcaccaattacaatcatagctgtaacaattaaaccccagtatataaatgcttgggatacaccaactgattcaatcaactgtgcgttaacgtatttaaagattaagctacctgaaccatatgcagagacagaaataccagcaattaaacctttacgctctggaaaccactttattaaatttgatagtgaagtgatatatgctgtaccatctgcataacctacaacaactcccgctagtacataaagtaatattagtgaggatgcttgtgaactaagtattaatcctagtcctaatgctaatccagctatcataataagtttacgaagtccccatttttcttgcaatttactcgcaaataaagttgaaaatgctaaagaaagactagtaattgagaaagttatcgcaacagcgttaagactccaaccatatttactaactaaaggctgattgaataaactccatgtatatatcgtcccaagccccatttgtactataactgtgccaaggacaacaagccatggattaacagttgattttttcatacctttccgcctcctctttctatttcaatgctattcgctaaatttactttttttatgttcattttggtcacctcttttgatttgacaccttcattgtataagatgtttttgtttatgtaagcacttacaagatagagcgtcaaaaacatggaatcagttacaaaaaacgaaggatgaaatacaaaaaactactgattaaatacaatagaaaaattttttatacttcaatccaccttattttttataaaatcacaaatttttttccaataaataaaactaaatattcactaatatatctatccgtggtttaatatatataataaaaaaatatttctgtctttaatgaggaggtactatgaaagcaaacgtaggggatactatactttttcaacgaaataatttaaagattacaggatctgtattaaaactttatactgaatcggtcttagttgaaattacaaatgtaagcggtggtacttttgaatttgatcgaacaattgtaaatcataaaaactataaagttttaaatacaaatacataaaacaacacaaaatagcccctgctcaacagcaggggctattttatataaaaatatttcactagtttatataccctaaaacattaacaatcttactcgcttttaaattgttaatatgataataaatttctaaacctcttctctctgctcgtaacactttacccttcatttttgataaatgttgtgaaacagtagattgcggaatattcagtaactctgttaattgtgttacattacaagtttttctcgtacttaattcatttacaatttgcagtcggattggatgcgccataatttttaaaatatctacatcttcttctgaaactaaagtttttctcatttcactcgtatatgttgtcataagacattccccttttatatgaattccatattcataagatctatttccaaattttttaaaacccttgattaaaactttcatatagaaataaaaggattttaaatttttgaaaacagaacttacattcactttatttatttatttggtacatatacataatacaatgttaatatgtgctctatgtgaagttcacataaatttatgatgaagatttacttagccactcgcatcctactcatctaattacccactgcataaaatcatcagttattttaacacattttaggcgtttgtatatactatttataaaacaacttttataaaggggggattcatatgcctacagcgttacaagaagaagtcgaagaagcacgggaaacatatgtcagtcgtatcatcttagttggaggatccgctttatttttagtaggcggggttatctcagcaatttcagcctttaaaacttataatcgtttggagaatacgccgccttctacagataattcatagatattttataaaataaaacgtcgcctccaatatgaagagacgacgttttattattcatacatatgacactaaaagtatcggtagattccctactccattttctaagcttacttcaccacaaacctagtctgactacacccatccttttgcttcgttacttctaatacagctggcattgcgtttttcagctcttgaacgtgtgagatgacaccgataaatcggcctgatttttgtaagtcaattaaggcatctactgctttcgttaatgattcttcatctaatgaaccgaacccttcatcgatgaacatcgtttcgatagtaataccaccttcatatgcttgaatgacatctgccattcctagcgctaggcaaagtgatgcgttaaatttctctccaccggatagtgtttttacatcgcgtgtttggccagtgtatgcatcgtacacatctaaacctaatccactttgacggtttcttttttcaactcgctcacttcgttttaaataaaattgtccatttgataatttacgtagtcgttcgtttgcgatttgaacaatttgttctaaatactcaattaagatgtaacgttcaaatgatatacgactttcgttatcacctttcattacttcatataaatcaacaagttcttggaaggctttttcttcctcgtgaatttgttcgtcaatacgtctaatgttttcatgtaaatcagaaatatatgttaccgcattttgcgcacgttgacgtttttctttaattatatcaagattaatttctagatcttttatgtgttcacctaaagatgtaatatccatatactctttatcttttaattctgcgtttaactcttcaatttgttttgcaagtacttcaagcgatgaataataaccttgaatttctttttgtaacatctccatctcggcatcgcttaatttggcttctttatacgtgaattgatctgtaaacccactttgttctagctctttcataaagcgtgcaaaagtctcttctttctttaattttgcactttcaaattgattagaagcacctttttgttcagcttgaatacgtatattttcattttgccaatgctgatacgcttcctgcactttcttccattcgtcctccattaacctaagttcctgcatagcttgattaaactgcgcttcccaagcttgtactgtttgtaagctttctggaatatttcgtttatcatgttcatatgacgtacgaagttgcatacactccatttctgtacggtgctgcattgtttccacttctcgtttttgtttctgaagttcttctattttttcttctacgcttttcatgttcgcagcaatctgcttacgtgtttcttcacttgcttttaacgtattaacgtctgctgctaattgttttcctttttgaacaagtgcactatatgtttcaactaatttttcggagttgtagccgcgcttcacaacttcttctatcacttgttcatattgtagttgatagaaattccatttctcctctacttgcacatgtaatttttcagcaatgttcttcttatctcttaaatcgtttaactctttttcatcgatcgcattactttgctctgtagctttttgtggatgattcgtactaccacataccggacaagattcaccgtcatgtaaatgaagagctaatataccagcttgttcacttaaccagcggcgctccatgttttcatatgcacgaactgccacttgcattttattatttaccgcttctttttcttgctcgaatttttgtttttcttgccaaacatcatatgcttgttttaaaacttttgcatcttctcgcatattcgttagttcttccactttagctacatattgctcaagtgcttgttctaattgctgcaattcatcacacattctctgtttttggtttgtatgctcttctagttgttgatctaacttttgcatactttcttttaatttccctatttgaatttcggcattttgtaaattcagctttctctcagctaatgattcaatgatcgcttgtaactcttctaatctttgaacaagttttttagcctcttctcgttcagcttctttattctttactacttcatacttctcctgagcaagttcaaagctattcattatctgttcttgtttgacgattatctgttttaacaaactttcagctttctgctcattttccatcgcttcttcataccattgttcaaatggtaataagcgctttgcttgttccgcacgtttaaagaatttttctttcctttcaattgctgcacggttctcttgtaaagtgttatatttctcattcttttgttgtaaatctataaatttctcatttacagattttgctgcatgaaaacgtgtttctgcatcctttaattgcttcgtttgaacatcttgttctacttgtaattgctcaacctctgccttatacacggttgtttcttgttctaacgcttctactacttgatgcgtatttacatgttcttgtgccactaatgtctctaataatgctccatcacggattggtaatttaaaaacattacggaaatagagctctctctctttttgtttttcttgtaagacgtctttccattgttttctcttttgatcaagtaactcacgcattaatttataacgatccgttttaaaaatacgacgtaaaatctcttctttgttttccgtctcagatgttaatagttttcggaattccccttggggtaacataacaatttggctaaattgatgtttacttaacccaattaaatcttccacttttttgtttacgtctgttacatgaaaacgatcgacggctggaacgttttctccatcaataacttcatataattctactgcatgtcctgtaatagtcttattcccttgttttttatgtccaagttgtcgttttatttcatagcgtttcccttttaactgaaaggttaattcaacacttgtataaacattatcatcagcaaattgacttcgaagcatgctcgtatcactacgttcttctccactagcctcaccatataacacataacaaatcgcatcaaaaatcgttgtttttccagctcctgtattcccagaaatagcgaaaatacgatgttctccaagatcttcaaaatcgattatttctttctgtttatatggcccgaatgctgtcataataagctgaatcggtctcatcctcgttcaccttcccattcttgcactgtttgtaatacatctataaataggcgttctttctcttctgataaatctaaccccttcatttctttatagaaagcctttaaaagagataaatcatccgttttatgtcttgaaacagttacttcatttgtatctgtgagttctcgtctttgcatcgctctttcaacgtgcattgcatttggatatacagatcgtattttctccattggctgtaagacagggttttcgtctaataattttacaaatacgtaatcttcacttgctgggtgctgtaataattcatctatttttgcttctactgttcgcattttacgacgtggtgaaagtaaccttttttcaattgctacttcaccagtttcattcagttctacaatgtaataaccttttttatgtttctcttcagaaattgaataggcaagtggtgaacctgaatatcgaatcgtctcattacgtacgaaatgcgcttgatgtaaatgtccaagcgctgtgtaatgaaacttatcaaaataatgactatttacatattcagcaccaccaattgaaagtggtctttctgcatcacttgtattctcctccgcttctcctgaagaagttacaaatgcatgtccaacaaatacatgtctagcttctttatccatcgtttcagagagctcattcataaaaatgcgcatcgcatcatcatgagaacgtacgtcttcatttttcaacacgtgccttactatgcttgggtctgcatacggtattagatggaagtgaacctctccatattcatcatttagtacgacaggttcatacgggaattgaaattgacctgcaatatgtaatccttgttttttcattaaactacttccaaaatggatacgatccggactatcatgattaccagctaccgcaataactggtgtttgtaaatcaataactattttttgcagcacatcatttaataagtctactgcttctgtaggtggaattgctcggtcatataaatcccctgcaataattacagcatctggtttttcttcttcaacagcctgtacaaactgatctaatacaatcttttggtcttcagtcatatacacgccatgaacaagcttacctaaatgccaatccgctgtatgaaataacttcatatttttctactccttttaatttactgattttagtgaaacgagttgatagtttattgtagtttttccgttctcccactctagcttcaatatcgttgcacttccaattctttcttcatttgatttatataaaggcaatatttcttgaactgtaaataagtgataaccatccaatattaattgaaatatattttcttcaatatgtaatcttacttctttttcatttgaaataatttttgtgtgcatctcaaatttcatgatagatacaacccctttttataatctctacattttaatagtatagtggctatgcaagattgacaagtacatacacagcaaagtacacacttttctattgttatatacttcatgtattttatataaaatacggtatgtgaaattttatattttctccaaaataaaaatgcctattatgacacctttatttttgtataaagtctttcattacataatataaaacggtaattaaaacgattgcgacgaaaaatgagaacactgcgacaatgtagccatctttatttaataaaatacagaatgaaatagatattataaaaatcggaaatacgagacgtactttatccttcacttcttctgtcgtatctgtatgatgaaaatactgcgttattcctatcattaaaaaagacaaaataataaccgacaatagtaaaggtcctggcattccgatttctcctttctctatttctaattcagtgtaaaattttttattacaattgtacgatttattttttcttcaaacacacttttagaattgataatgaacatttcacacctatataatagcgcttttatcattataacttcaaataattacacttacagtaatgttgtaatattccccctcagtctctgaaatcctgcaaagataactcgtcaaaatatgcagtgaccaaattaatatttaccgtcaacttttgacaaaatttataaaggacatttcagtacatatcaagaattaagaataagaagatatgtaagggaggatgcattatgactgaacaagttttattttctgttagtgaaaacggcgttgcgacaattactttaaaccgtccaaaagcacttaattctttatcttatgacatgttacaacctatcggacaaaaacttaaagagtgggaacacgatgagcgtattgcacttatcgtgttaaaaggagctggcacaaaaggtttttgtgcaggcggcgacattaaaactctttatgaagcgcgttccaatgaagtggcattgcaacatgcagaacgtttttttgaagaagagtatgaaattgatacatatatttatcaatatacaaaaccgattattgcttgtttagatggaattgtaatgggcggtggtgtcggtcttacaaatggtgcgaagtatcgcattgtaactgagcgtacgaaatgggcaatgccagagatgaatattggcttcttcccagacgtcggagctgcacatttcttaaataaagcgcctggatatacaggacgattcgttgctttaacagcatctattttaaaagcttctgacgtattatttattaatgctgctgattactttatgacatctgattcattaccagagtttcttactgaacttgaaagtgtaaattggcataaagaagatgatgtacatactaatttaaaagaagttattcgtacatttgcaactgctccaaacttagaaagcgagcttgctccttcattagaagtaatcaattcacattttgctttcgatacaatggaagaaatcatccattcattggagaaagatgaaagttcctttgctctaaaaacgaaagaaacactgttatcaaaatcccctatttcactaaaagtaacattaaaacagtttattgatggaaaagataaatccgttgaagaatgtttcgctacggaccttatacttgctaaaaatttcatgagacatgaagatttctttgagggagtacgctccgttgtcgttgataaagatcaaaatccgaattataaatataaacagttaagtgacgtttcagaagaagatgtgaatcgtttctttaacttacttaatgcataaaatgaaattgtcatgaggggatgttttgttcatcccctacctaacttctttgcttcagctaaatcttgtgcggtgaaaatcttactacccgcaaatagcggtataaaatcgaagctatatagtagtgtaattacagctactatatagccttttttatttaattatttttaacaaaatttaattttattaaatccatttttgtgctacactgattttaatcaaatattctaaaaataaaaaggaggggcggctatgatagaaaattatcttcttttcatcattatgtctatttgccttatcattttacctggtccagatacagcaatggctacgaaaaatacattggttgctggtaaagtcggtggagtgaaaacagtgtttggtacatgtattgcactattaattcatactttagctgctgtaattggtctttctgcacttattgtaaagtcagctcttttattttctattttcaagtacgttggggctctatatttaatttatattggtattaaagcccttttagcagtaagaaataaagaaggcattgatacgaacgatatatctttgaataatgaagatgaacacacctcttgctttcgacaagggtttcttacgaatttattaaaccctaaagttgcagtattctttttaacgtttttaccgcaatttttaaatccaaatcataatacgtttatccaactactcgtaatgggccttacttacctcgttttaacagccatttggttcgctttttatatatttttaattgataaaattagtgcttttatgaaaaaaccgaagacgcaacgttatattcaagggctaacaggagtcttcttaattggttttggtattaaacttgcttttgaaaaaagtaattaacaagatgaaaaccaccactattaatagtggtggttttcatttaataactaatttggctgtttattttatattaaaaccagcgctcagttacaacttttttacgtgtatagaattgaacgccatctgtgccatttgtacctaaatcaccaaagaatgacgctttatttcctgcaaatgcgaagaatgccattggtgctggaacatttacgtttacaccgatcataccagcatcgatattatcacggaacgtttgtgcatgtttaccgtttgatgtataaataactgcaccatttgcaaatttagattgatttgttagtttaataccttcttctaaatctttaactcgtacaatgcttaatactggagcaaaaatctcatcttgccaaattttcatttcttgattcacgccatcaaagattgtcgcacctacaaagtaaccttctccaacttcttcattaattttacggccatctactaataaagttgccccatctgctacaccgctattaatgtagcctaaaacgcgctctttatgagattcacggattaatggtccaacatagttctcttcgttaaagccatcgcctacttttaattttttcgtttctgctactaatacatcaatgaattcatcagcaatttcatccactactgctactactgagcatgccatgcagcgctctccactacttgcaaatgcagatccaattacaccttgtactgttttctcaagattgcaatctggcattacaatcgcatggtttttcgcacctgctaacgcttgtacacgttttccgtgtttcgtacctgtttcatatacgtaacgagctaccggctcagagccaacgaacgaaacagcctgaatatctttattttctaaaatgctatttacaacatcttttccgccttgtactaaatttaatacgccttttgggaaacctgcttcatagaataattctacaagtcgctccgctaaaagtggcgttctttcagatgtttttaatacgaatgtattaccgcaagcaattgcaagtgggaacatccataacggaatcatcatcgggaagttaaatggcgtaataccagcaacaactccgattgggtagcgccaaatcgatccatcaattccgctagcgatattcggaagtgcttgacccatcattaaatttggcgtagatgttgcaagttctaccgcttcaataccacgttgcacttcacctgttgcatccgttagcgtcttaccattttctagcgtaatgatttttgcaagctcatctttattttcttgtaatagctgtaaatatttatataaatttcttgaacgatttggaactggtactttagaccatgtttcgaatgctgcttttgccgcttcaacagctttttcaacatcttcttttggagatagtggaacgtaagcgataatttttccagtcgctggatttggaactgcttctacttccgtacctgtcgattcaacccactcaccgttaatgtgattttttactcgtttaatttcagttgtaatcattgtattctctcctttgtataatttatttttgattagaaattaattgctcgctaactttcttatataaagcagccatatcgttttcaccatatccagcttgactcgcttcgtcatatacgtttaataacatttcgcttaccggtaaatggagttcgctttccttagctaagtcaactgcaaatcctaaatcttttttcaataagttcacagtaaatcctggctcgtagttttcaggcgctataaaacttttataattacgttcataaattctactttgaccgtaacttacatttaaaatatcaaacattttatctaaatccatattgttctttttcgctaatgttaaagcttcactcacaccagctgtataaaaaccaattaataagttattaattaacttaacagttgtaccactatcaatctgctcactaacgtggaaaatgttcgcgcctagtacgcccatgatagattccgttttctcatatacctcttttgatccaccaaccataaacgttaatgtacggttttcggctccgattacaccaccgctcacaggtgctgctaaaaagtctactttcttttcctttgcagcttcctctaactgtttgtttaactgcggcgataccgtacttgtatcaatgaaaactacattcgagtgaccattttcaaataatccttctgctccaaaatataccgcttcaacagcgcgaggtgaaggtaaacttgtaaaaactacatcacatgtttctgctagttttgagattgatagaccgataattccgccttctttttcaaaggacgcttccgcctctttatttaagtccacgccatatactgtgtaacctgatttaactagattttttgacattggaaggcccatgttacctaaaccgataaaaccaatctttttcatatcgctttcctcctatttacacaatatatttcccgcgatttataatagctttcgcaatttctctcttcttcgtaaatacgttcgtgtataaaggcactaataattgacggatttcagctaaaatcacatgtctatcttgttcttttgtgacagctgctgaaagtacagaaatcgccgcttcttctactttacggtatccttcttcacaaataacatccgttatgagttgcttcgtacgttctttttcctctccatttttacgtactgcttttctcgtacgtaaaaacgctgattccatgatgtacacgtccgtcaacatatttgatattacacgtgaatattcttgttcttggtcaatttttagacctggagttttagagagcgttttcaaagattgtttcaacaattttttcgctaataaaatgtaacgatggtttctttctacatttgctacattactttctacttcagtgtcttctaattgttcgatttgcttcattaacattttagcaactgttaatctattaatttcgttcgttccttcaaaaatacgactaattcttgcatcacgatataatcgttctacctcatactcttgcatataaccgtaaccaccatgaatttgtacagcttcatctacgatataagcaagtgtttcagaagcatttactttattcagtgcacattcaattgcaaattgggacattttcttcataagatcttcatcgctctcatgaattgcttcatcgattacacctgctgtacgataagctgcactttcggctccatatgtagcaataatcatatttgcaattttctcttgaatcatcgtaaagtctactaattccgtttggaactgttttcgctcttttccatattgaaccgacaaaccaattgcttgttttgctgttccaatatttccaaaagcaagtttaagtctagcaaagttaagaatattaagggctacgtgatgccctttcccaacttcccctaaaacattttcagcagggatgacaacatcttctaaaataagagtcgctgttgaagaacctttaatccccattttcttttcttctaatccaatagatacaccttcacatgttctttcgacaataaacgctgtcattcctttatttgtcttcgcaaaaacaacgtatacatctgccatatgagcatttgtaatccattgcttctcaccatttaacttccaagctgttccctcttcattcaatacggcgcttgtttttgcacttaatgcatccgaaccagcatttggctccgttaaagcataagccccaatccattctcccgatgcgattttcggtaaatatttttctttttgctctttcgttccataatatatgtaaggcaatgtaccgacaccagcgtgtatattaaaagaaacgctaaacgcaccagcgtaccccattttctctgctacaagacctgagacagcctttcctaactcgaacccgccataatcttctggtacctcaatgcctaataatccaagttccccagctttctcaaataattgacgagaaactttatagttatgttgttcaatattctccatttgtggaacaatttcttgtttaacgaattgttctgtcgtttttgcgattaaatcttcatcacctgaaaaatcttctggtgtaaagtaagtatgatttatatctttattaagtgaaaaaaattcatcccatggtaacttcgttttctccatatgtatccccctatcattcggctttcatagctttttgcttatgctcgtctacgatgagtggaatatcttttttgaaaatagaaggcgatgatttttcacatcaagcattttattttgccaaagatgtattttcatcgccttcgctgctttatctattgatcttctgataatactgtttttgcaataccagtatctaactcttcaaagtcatgatatgaaattgtttcgtataattcacttctcgtttgcatattagaaagtgcatctttttgagagcctgtttctttaattaaagtaaacacattttcatacgctttcgctgcaacgcgaagtgaagttacaggataaataaccatttggaagcccatattcgcaaattcctctgcactataatatggagtttttccaaattcagtcatattcgcaagcaaaggtgcatttaccttactattaaatagacggaattcttcctctgattgaagcgcttcagggaaaattgcatctgcacctgcttttacatatgcatttgctctttcaattgcttcatctaatccttcaacgccgcgagcatcagtacgtgctacaatgtataagctcggtgcaacttctttaatcgctttaattttttgaaccaattcttctgtagtaacaagtttcttaccatttaaatgtccacatttttttggtaattgctgatcttcaatttggacagctgctactttcgcttccaccatttctacagctgttctcgccacatttagtacaccaccaaatcctgtatcaatgtcaacaagaacaggtaagtctgtagctcttactaaatctcttgctctctcagccacttcagtagacgtcacgatacctaaatctggtaagcctttacttgcagtataagcagctcctgataaataaagagctgaaaaacctgtattttttgcaactaaagccgccattgcgtcatgagcacctggaatttgcaaaatttcatttgcttctactaaagctcggaatcgattcgcaagctcctcttgtgttgactgctttttcacaacccaagccattctaaattccccctattattaaattaagaatagatctacaaattcgtttacattcatattttctagtttttcttcatttaaacaaacttcatgaatttgttcttgttgcttactagaataatgacctgccatatttgcagtgaatttttgaacaacttttggaattgcttcgtctctacggaagcggtgaccaagtggatattcacattccacattttctgttactgtgccatctttaaagtgaacttgaacagcgttggcgattgagcgcttgttcgggtcaaggtaatctaaactgtactgtttgttttcaacaacaaccatcttattacgtaattcatctacacgtggatcgtttgctactgcatcttcataatcgtctgcaacgatatctccttttaataaaccaattgccgtaatgtattgtaagcaatgatcacgatcagctgggttatttaatggaccttctttatcaataatacgaattgctgattcatgagttgtaattgtaatacggtcaatttcatctaatctctctttaatttccggatgcaacttcactgcacattctgcagccgtttgtgcatggaattctgctggatatgacactttaaataatacattttccattacatatgactctagtggtcttgctaattttaattcttgtttattgaataatacatcttggaatccccatcctggcgcagataatgctgttggataacccatttcaccttttagagcagtcattgcaagatgaacaccgcggctcgttgcgtcacctgcagcccatgatttacgtgagcccgtatttggagcatgacgatatgtacgaagactagaattatcaatccacgcatgtgataatgcattaaagatttcttcacgtgttccgccaagcattttcgcaactactgcagttgttgctacttttacatataatacatggtcaagaccaactctgtttaagctgttttctaaagcaagcacgccttgaatttcatgtgctttaatcatcatttctaatacttcacgtacttttaaagcttcttttccttctgaaatacgaacacggctaatataatctgcaactgctaaaattccgcctaggttatcagatggatgtccccactctgctgcaagccaagtatcgttatagtctaaccaacggatcatacatccgatattaaatgcaccttttactggatctagtacataagacgtacctggtacacgtgtaccatttggcacgattgttcctggcacaactggtcctagtaatttcgtacattctggatattgcagtgctaaaattccacatccaagtgtatcaagtaatacgtaacgagctgtactgaatgcttctgcactagtaacctctttatttaatacataatcggtaatctcttctaataatgcatctttttgcttaatttcatttgttttaatcatgctattctttcctttctgtcgaaaattcgttattattaatgatgggtgtcggtcaaacacccatctggcgggcggcgctaacaactccccagttgttcttatttactaagtacatgtcgctcgccaatataatttacacgtggacggaacaaacgattatttgcatgttgctcaataacgtgcgcacataaccccactgttctagagctaaagaagattggtgtgtaaagttgaattggaatacctagcatccaatatactggagctgcataataatcaagatttggataaattcctttttctttttccataatcttttctccagcttcacacatttcatatagtgtataatcaccttttacatcacataactgttttaaagcttccttcatcataagtgctcttggatccatcttcttcatataaacacggtgtccaaagcccataattttttctttgttatatagtttcttctgtaataactcttcaaatttctcaacattaccagcttctaaaagcatgtacataaccgcttcatttgcaccgccatgtaaacttccttttaaagatgcaactgcacctgttagagcgccgtataaatctgattgtgttgatgcaataacgcgagctgtaaatgtagagtttggcatttcatgctcactatataaaacaagggaacgatcaaagatcttttcctcaagttcagttggttttttaccagttaacatatagaagaaattcgcactataagataattctttaagaggttcaattggctcctcattatttaaaatatgatagctatttgctacaatgtttggcactttacttaacagcttgtaccctcggcttttattcacttctaacgagcggttttcgatatcattatcgtaaccagctaacgctgacacacctgtacgtaatccatccatgggatgcgtctctttaggcaatgcctttagtacgttgaatacaccttctggtactgcatattcttcttttaatttcttttcaagtgttgctttttcatcttcattcggtagatgttcctccaataaaaggtgcacaatgtctaaatactcttttgtttttgagagttcgattaagtcatacccttgaattacaatttcaccttttactgtgtcaagaaacgagattttcgtctccgctgccactataccatctaatcccggggaaaatttctcttcagctttcatcattatttcctccaatcctaatagatcttcgtgcacataactgtaagcctttacaatattgtgaaactacatttctatttcaatgtatcagagtttttagaagatttcaatttattttataatgataagtttcctacacttttcttaatgtaacaatacaattttttgaaaataattcttatattttataaagaaaggatagacttctttgcgtattttcaaaaacaaaatataaagatttttcatataacaccgccaaatatacaattattctaattttatttgagaaatagaaaaaacgagctgtacataaatacagctcgttactatatgatatttatttcactatctcttaaatataatttttatataaaacttattcatttttaataaagttattattttacataattaaattgaatttcttccatttcctcatgataacttacaaataaatcatagttttgaaaataccaaagatcatcacaatctacaaaaaatataataccttccttctcaactgacactatttcgccatcgggtctctcagcaacaacccctaaagaatatccgggctgaattgaactatcccctccgtaccttacagtaaaacgtacagattcaccgtgctttatacgtaattcttcctggaaccattgcagagctttacgatcaattgaaattctcatctttattcctccagtttatgcaaactctttttttcctaatcgttgttttacaaaaaagacgaaaataattaaggctatcaatgctgaaattgcactccctgaaaataaaatacgataaccaaacatttgtgaaacaactccaagtaaaatagcacctaacccgattcctaaatcaaacgctgtaaaaaatgaagcatttgcaactcctcttttactcggatcgacaattgtaagcattgccgcttgcaaagctggctgcgctgaaccaaatccaataccgtataatgttgctgcgataattacacctatcaaaccatttgaaatagttaaaacaactatagctaaaatagtaatacataatgctggaagtatgatgaatacttctccatacttatctaatagtttccctgaaattggtcttacaattgttaatgcaattgcatatacaagaaagaaagttcccggattcacatgaattgatgatgcaaataacggtaaaaaggttgttattcctccatatgcaaacgataaaaagaatactacaatcgtgattgttaatacagatttctcaaatagctgcatcttccctttttctttttgtggtgtaaatggcatcttcgttattaatgataatacgactgccataaaagataacaacgtcgctaataaaaatagaccatcaaatgaataattttgcacaacccatagtccaatcataggtccgatcgccattgcaattgtcatcgccatcccgtaccaacccataccttcaccgcggcgtgaatctggaataatatccgttattgctgttccaacagctgttgtagaaacagcccatgttactccgtgaataacacgtaaaacagctaaaaggacaatagtcgatgctatattataggaatacatcgttaagccaaaaaagatgagtccgaaaataataaaggatcttctaccatattgatctaacattcctccaataatcggtcgtattacaacagcagctattgtaaacatccccatcataagtccaacttgcgattcattgccacctatctctttaataaagagcgggagcgttggaacaagtaaataaaatcctgtaaataaaaataacattgcgaaagtcatttgaataaatgatttcgtccataatcgttccataaaaatacctccatacactcgtaaaatattacgattaacaccttcattgtatattttttttatctcttttccctccgcaaatagacgtatcttttcatattaaatagtccaccatcagcttacattagtcttaagactttgtacgcatgttttaaacaaaagtcctatataatatgtacctttatatgtgtgaaaagaatatactaatttattaactcaacttaggagtgaatatttcatgtgggtattattaagagtaactgccgtagttccttcgactcctgggatacatgttcctgcagttcatacagctagctccgatgtaggaattgaacttcccgcaacttggcagcaatatcaaattcccggtcaagttaccccatcattttggcatcatggtacacaccccagtagtactcccattcatagccatagttatcctccactacctccgactcaagtcttttatcatttcccatcaatttattttcaaaatttttatggtacgtttaacatttaaaacagatcctttcatagctactacatttaaacgaaaaaagcacttaagattgtaaatttcacaaatcttaagtgctttttaatattttttataaatttttcttattgcccattattagcaggtgcctctcctgcattaccaccggtcgctggtggagttgtatttccttgacctcctccgttatttgctggaggtgtcgtatttccttgacctcgaataacgttttttgacacttgggggtagtgcaaattcttaagttgatgggcatgggggcttaccatgaaattcattacttttttcgtcggattaattattgttttcttgctcgcttatattgctagcaataataagaagcatattaaatttaaaccaatttttatcatgcttattatacagttaattttaacctatttactattaaatacagaaatcggcctcatacttattagaatcatttccagtttgtttacaaagctactcgagtatgctgctgatggagtaaattttgtatttggtggtcttgcaaataaaggtgaaatgccatttttccttactgtattattaccaatcgtctttatttctgttttaattggtatattacaacatttcaaaatactaccattttttattcattggatcgggtactttcttagtaaaataaatggtcttgggaaattagaatcttacaacgctatcgcctctgccattgtcggccaatcagaagtttttattacagtgaaaaaacaattagctcaaattccaaaacaccgtctttatacactttgtgcctccgctatgtcaaccgtatctatgtctatcgtaggtgcctatatgacaatgattgaacctaaatatgtagtaactgcactcgttctcaatttatttagcggttttattatcgtactcatcattaacccttacgacgttaaagatgacgaagatattttagaaatcaaaggtgaaaaacaaagcttttttgaaatgcttggagaatatattcttgatggttttcgtgtagccattgttgtcggcgctatgctcatcggatttgtcgcattaattagttgtattaatgacttgttcctcattatattcggtattacgttccaacaattaattggctacgtatttgcacctatcgcattccttatcggtgtaccaagctctgaaattgtagcagctggtagcattatggcaacgaagcttgtaacgaatgaatttgtcgcaatgatggaccttagtaaaatttctaatagcctttctccccgtacagttggtattatttctgttttccttgtatcttttgccaatttctcttccattggtattatttcaggtgcggtaaaaggactaaacgaagaacaaggaaacgttgttgcgaggtttggccttaaattactatatggagctactctcgttagtattttatctgcaattatcgtaagcattatgttgtaattaggtaaaattttatcattttcttatccctatcttttgtatacaataacgaataggtgtcttataaagtgaaactttaatcagagtggggctatccccactctgattattagccttcatcaatcgggtatttacgggcagttatctcccacctaacttcattgtattcactggactttgaggtgggcgttttactgctcgttaataccggataaataatcaagacatctattttttatacatgtacaatcgcttttatttagcgtaaaatattttttatgtgtttgaatacacttctaaatgtatacactttgatagttttaaaggagaaaaaatgatgaaatccgacacgaacaacgatacgcgagccaaaaaaggacgctcaaagaaaaaacgcctactttggttccttcttattccattactaattgtagcacttggagcaggaggctactccttccatatatacagtaaagcaaagtccgtcttaaataatgcttatgctgaactaggtcgaggagaaaagtccagtaaacgtgaaaaagctgttaaacctatgaccgacaacatttccgtactaattatgggtgttgatgaaagtgatattagggaaaaagattatggaaaagcaactcgaacagatgcgttattacttgcaacaattaataaaaacgataaatccgttaaacttgtaagcattccacgtgactcacgcgtctacattaaatcacgtgataaatacgataaaatcacacatgcgcacgtattcggtggtgtagacagcacaattgatacggtagagaactttttagatgttccagttgattattatgtaaaattcaattttaaatcctttattaaaattgttgattctcttggtggcattactgtggacgttccagttgaattcacagagcaaaatagtaaagatgaagcagatgcaattcatctaaaaaaaggacgtcaacatttaaatggagaagaggcactggcactagctagaactcgtcacatcgatagtgattatatgcgtggccaacgacaacagcttgtattagaggccattgctgaaaaggcactatctcttaattccattaataaaatcggtggcctactagacgctgtcgataaagacttaaaaaccaatttaacttttgatgatatgatgacaattacaaaaaattcaatggattcaaatttaaagatggaaaaaatgcaagtagaaggtacagataaatatataggtggtatttattattacgtgccaaatgaaaaaagcgtcgatactatttcaactacccttcaaaaacatctcggtgttacgaataaaaatgaacataaaaaattataataaaaaggctgctagatcattctagacagcctttttattatatttttcaacatatttttcatacacattgtgacaagaagtgacaattattacagcgatgtaacattttttatgaaaaaattacacacacagtgaaaataatagtatactagtacgtacataatgttattttcatcatttttatacaaaaaatgtaatacatatatttatacataaatttctggggggaaataaatgaagctaagtaaaatactgattggttctgcaattgctgggggcatattactttgtgtaggcggtgttgggggatatcaatatgtatccaaattaaataatcaattagatactactgcattaccaaatactacatttgaaggtatttctctcgatggaaaaaataagaaagatattcaagcaattattaatcaaagggtaactgaattagatcaaaaatcccttacctacatattccaaaacgataaacaaacttacacatggaaagatttaggggtaaattataaagagaaagatattattgacaaaatcttcaaagaacaagaaggaaacgtaatgaatcgttacaaaatgcgcaagcaagctgaaaacggtgaattaaaacgtgactataaattaacaccacaattaaatgcaacagcttatgaaacctttataaaagataaatataatgaaacattaaaaaatcctgttaatgcagaattaagcattgaaggctcaacagtaaatgttagtcaaagccaaaacggagaaaaaattgataaaggaaaactaaacagtttaacaaacgaagctattactactggtaaatcagatgttacattaccagttacattcataaaaccagaacgttctacagaagatatacagaaaatgggtattaaagaagtcattgctgaatattctactccaatggctggccgtaacggaaatcaatcatttaacgtaaataagtcagctaatactttaagtggggttattgtggcacctgatgaaacatttagttttaacggccgcgttggcgtaactgatgctgcacatggttacaaatctgcagcagtatattcacaaggtaaagtaatacaaagtgcaggcggaggagtttgccaagtcagtagtactttatacagcgccgctttaagggctgatttaggaattgtttctcgaagcaatcattctatgccagtaaattatttaccacttgggcaagatgcagcagtagcagattatggtccagatttaaaatttaaaaataatacaggcaattatatttatattcaagcattttcaaatggaggtagtattactacacgcattttcggtacaaatactggtaaaaatgttgaagtttcttctcaagtaattagtaggactagtgataaaatcacagcggttacgtataaaaaagtaacacaaaacggggaagtaatatcaaatggacaaatttcaaaaagtgtatataaaagcgccccaaaggaatagatactatcaaccgaatagtataaagaaaaaggcgtgattaaatcacgcctttttcttttgcagtaatagtaaaaaagtttcaagatggtctttcgtttcttctaaagaccacatacgatttccttgcttcgcagctaatacacacgcctcttcccacgcgttctttttcttcatatttattaattcatcacgtaatttcaaaacaatttcttcgtcttcttgttcaataaactcttccatcacgcttactatttcatcctcatgaatacttaacgtacagtacgatttaagaaagtattgtaatgtcgtatacataatgtactcccccttcttatttatcagatggataagaagtaataatcttaaaccctaattcccctgacttatctcttgctaaaacagtaacagtttttactaacttgtcttttacactcatatttttctttattaccgtttttccaacagggaatgaatgagttgtatttaatacgagacgagcctctttagaattttttaaccaatcttgaatttccttgtcatgttgcttcaagctatcttttacagctttcgtcgctgtttctttatcatagtatgtacttgcggctgacactttatctgtcttcaagcgattcttcaaatcctcttctgacttgcctacatgtctttcaatcgtatgaccatttttaggtggtccttccatttcatctaaaatattatcactaattttttctaccgatgcagcttgattccctgtctgtttctctgatttttgttcttttcctgcacatccacttaagatcagcattaatgccaataaactactgaagaaaagactacttattcgtttcatcatatcacctcttccatgattattatcgcaacttcactaaaagtcaatttcacaacgaaaaaatctatcatttttcatttttttcatctgtttttccatatttaccgcgcaatttcatcaaccctctatttttcgccttttataatatataccccctatattttataattatttcccagataaaatcgccaataacataactataaaactcttttatacaaaggtttttatagtgtttttaaaaataatttaaaatacccctgtttttatatacataatacctgtataaggtataaacaccattcttatcaacgtttttctacattatgtaaatttacccttgcctatacaaacgaaatgtggtgtaatgcaaaaaaagataaaggattttaaacaatggctgaaacgattcaaaatttcttaacagaatactattcaatcgcaattccacttagtatcttaattaacatcatcattagtcttttaggtgttattcctagcatctttttaaccgccattaacatacagctcttcggtgtaaccaatggcacaatcatttcgatcgcaggtgaggccttaggggctattatctcgttttatatttatcgcatgggccttcaaaagttcactcacgataaagtcaataagtacccaaaggtagagcgtcttctttatgtagaaggtagagaggcctttctactcgttctatcgtttcgattgatacctttcatcccatcaagtatcgttactttatttgcagctctagggaaaatgtcattactctccttcagtattgccagtacaataggtaaaataccggccttattgattgaagtatattcggcataccaagtcatgaacggaacaaatgaagcgaagtgggttgtaacaatcgcaggcgttattggattgttttatttgtggaaaaaatggagaaaaaaataaagaaggagcataggctccttctttatttttgaggtattttattaatagctatccgttaagtccttagttaataccaacagcactaaatgattgcttaactgctgctacttcagcagaatttgcaccatataagtctgctgcagcttgtactgcaccagcacgagcttgactaaatgtagtagattgcgtgaaatactgtgtatttgcacggtagtaaatcgcacctaatttatctttgccgataccatttacagttacaccgtaatgcgtaccgccatttgctaataaataagcttgtttattaataatgccgctgtttgtatgaacgccaccgttatcacttgaaccagtgtaacgcttagaataatggtctggatcaccatacttcgtaggatcactcatagagcgaagcgcgtctcctgctttaccaggtgtgtaaatatcttcaccaatctcccaatccgggttacggttatcatagaattctactaaagtaccaaagatatcagaaatcgcttcatttaaagcccctgattcattttgataaattagatttgaactattttccgtaacagcatgcgttaactcgtgaccaattacatcaattccaccagataatgaagtaaatgttacaccatcaccatctccgtataccatctgtgatccgttccagaatgcattgttataattacttccgtaatgaactgttgattttaacggcgctcctgcatcattaattgaattacgattaaatgtattcttatagtaatcatacgtgatacccgcatagtaatgagcatctaccgctgctgcatcatacgctgcattgaaaacattatctgcatctgcccataatgttcctggtaatgttgaacggtttttcgcatcatatgtgaaaatcgttgccccgcgtgtattatcttgtaagtagtaagatgatccagataacgttgtattaagagacttcgtatctcctagtacgcctttaccagttcctactttattcgttcctgttacaggctttacaacagctttcgcatcctgtttaggagcctcttgcttaactggtgacttatcatcattcgtcacatgatcaattgtattaaacttatttaatactttaccgctgtctgcctcaatgaaatagtagtagtttcctgggcttggatctaagaagtttagatttacaacatatgcatatgttgtttcctcaccgttttgatatacatataagtccgcttttggttctacttcatatttcggtgttacccctaaatcttgctgcgcgatttcaattgcttttgcgccttcaatcttatttttatttttcaacttttcctttttgtctaaatcaggtgcaactgttccagacaatacttttaaagaaccgtccttacttacgtgagctacttgagtagaaccccatacaggcactccttcgtaaacttgttgcatacgtactactgttgaatcagttacagcatctttcttcacttgtttcactttgaaagaatcttgtgcactcttttcccctagcttgtaatcaccttttgctgcgtttaagtaatcaaacacaacagattctgctttcttgccagttgcttcagttagatcaccagaaataaactcaggtgactgcaccgtctcattgtacttcttagtagagagcacatttttagaatccgcaaacgcagagcctgtccctccaaacgttgtaactgccattcctgtcgctaacactaatgctaaactcttctttttcatataaccttccccctaataaaaaattttttgaaaaagagtagtttcatattagcattatgtttccactattaatatactaaaaattcaattaatttatttctcaagttttgtagaattttgaggaacaaatattgaaaaaacccctttccgattggaaaggggttttttcaatattttcttaaccataaatatctggattagagtaatttataaccttttcttctgaaaatttaaaaccgtaaatatctgggttagaatattttatactactttcttttaaagcgtttaatccataaatatctggattagagtaatttactgagccttcttttaaagactttaccccatatatgtctggatttgaataattaacgcctaaagaaagaatcgctactattccaagccctactgcaccataaatgcgctttttcaattcaattcctccttttcttctaaaactttaataacttctttataatatttattactttcctcatacttaaattcattctctaaatacatagctaattctaaataagcattttttaattccttcatactacctacactcttaaaaaacggaatagcctcattctctaaaaatctcttaaattcttgagattctccaaaatatttatacttaaatatacagaatgaataaatcattttattgtatttctcatcactccgtgagcaatcaattcctttttctatccattcctgcgcttcttcataacgtttaagatgaatgtattgcttagccagtccataaattgtttcaatataattcatattgacagtcttctgcaattcgaaactttgaagaaaatagtctttagatttatcatgctcatttttataatggtataattcccccatattatttaaagtcatagctttaatcatatctttttccgcaaaagaatctacttctcttaatatactctcataaatctttagagcttcttcatattgtgctttttcaacataacttaaagcaataatcgtttgacaatttattacataacggaatttatattcgttacggaacccctccatggcaatatgagcaaaatgcatggctaaatgtggtatatttagatgactatacgcaagacttaggttataatatatccccgtttcataatatccttgctctttagccatttcttctgtttcaattaaatattttaaactttccttatgcttatattgcaaactaagtaataatgccttactgtacgtatacaataacttttgaaagggtgagtatttcttgtacactttcttcaatctgtccaattcttcttcaagagcaggtagatctcgcttcatcattaaataacgtgtatacagcagtttataataatttataatttcaaaatccaacacatgcttcatttcaccttgcaactcttcatatatacgttctacttgttgcttgtccaaatgaactagtgcattcaaccattcatccagcttccccttcacatcttcttctacatctctcaaatccgtcacagcaatttctaatcttgcgcagagcaattgtagaatttcttctgatgcttcgatctttccattttcgatcttacttaagtatgagacagaacaaatgccctgacataattcttcttgtgtcattttttgctgaagccgtttgtaaaagacttgtttgcctattttttctaatgtttgttgcattgtcctcctccattctcattaccccattactctaataatacataaaatttggagaaatataaattgataaatataaattttctaaaaaatatgcataatttcatttttttctctcttgacttcacatcaatatctcttctttgctaccaatggtgaaaaattggtatactataaccaaattatggaggtgttctcgcgatgactcattataaagacgatagttatgccttacatacagacctatatcaaatcaacatggcttatacatattggaaagatggtattcataatcgccgttctgtttttgatttatattttcgaaagcttccatttgagaacggttacgctgtttttgctggccttgagaaaattgtagagtacattgaaaatttcagttttactgaaagcgatatcgcttatttagcagaattacaatttgaagaagaattccttcattatttacaaaatatgaaattcactgggacgattcgtagtatgcaagaaggtgaagttgtatttaataacgagcctttattacgtgttgatgcaccacttggtgaagcacaaattattgagactgccctcttaaatattgtgaattaccaaacattaattgcaacaaaagcagcacgtatgaaacatgctgcaagtaatgatgagcttttagagttcggcacaagacgtgcccatgagttcgatgctgccctttgggggacgcgtgctgcctttattggtggtttctcctctacaagcaacgttcgtgctgggaaacgctttgggatccctgtagctggcacacacgctcactctttcgttcaagcatatcgcgatgaatacgtcgcgtttaaaaaatacgctgaaactcataaaaagtgcgtctttctcgttgatacatatgacacattgaaatctggtgttccaaatgcaattcgtgttgcaaaagaatttggggatcgtattgatttctatggcatacgtcttgatagtggtgatatggcttatttatcgaaaaaggcacgaaaactattagatgaagcagggtttacaaatacaaaaattatcgcttctagcgatttagatgaatacacaattatgcaccttaaatctcaaggagcaaaaattgacgtatggggcgttgggacaaaattaattacgtcctttgagcaacctgcattgggggctgtttacaaactagttgcgattgaagatactgacggaaaattaaatgatacgattaaaatttcatctaaccctgaaaaaattaccactccaggactgaaacgaatttatcgtattatcaatcgggtaaatgatcatgcagaaggcgattatattgcattagattctgaagaacctggaaaagaagagcgcttaaaaatgttccatccagttcacacatatataagtaaattcgtaacaaactttgaagcccgtgaactgcataaagatattttcgttaacggtgaaagaacatatgaactaccaagtatattagatattcaaaaatataatgaacagagtctctctctattttgggaagaatatatgcgaactttaaatcctgaagaataccctgtcgatttaagccaagagtgctgggatcataaaatgaattacattcaaacagttcgagaacaagtcgaaaaaaacatacaaaagtaaacagagaagtttccccttctctgttttttcaatactatatggatatttgtaaaaaatatattaaaagaataagacgaatgtattttatttgtaaattttaatataacgctatttaaaagtaaaataatatttggtattattttattgagtcaatttcaacaaaatcaccaataaaaaagaggacgcgggtcgcgtcctcttttttataaatctttcactcttaatacacgcattgcatttaacactgcaagtagtgtcacaccaacatctgagaaaacagcttcccacattgttgcaataccaaaagcaccaagtaataaaacgatcccttttacacctagagcaaagatgatattttgccacactatacttcttgtacgttttgcaatttttacagctgtcgcaatttttgaaggctcatcagtcataataacgatgtctgccgcttcaattgctgcatctgatcctaaaccacccatcgcaataccaacgtctgcacgggctaatactggtgtatcgttaataccgtcaccaacgaaggcaattttttcttttccgtgcttcgctgcatcaattttttcaatctcttctactttttgttgcggtagtaattccgcatgaacttcatctaagcctaattctttaccgacagcttcaccaactggttttgcatcaccagttaacattactgtctttttaatacctagttcttttaacttttgaatcgcttgtttcgaatcctcttttacctcatcagagataacaatataacctgcatatcttccatctacagcaacgtgaactaatgtacctactgtttctggttgcttaaattcaatattttcttttctcattaattttgcattacctgcaaaaatttcttttccttgtacttttacgactgtaccgtgaccagaaatttcgttataatcatcgattattttttcatcaattgattttccatatgcctttcgaatagattgggcaattggatggttagaatatacttcagcaaatgccgcatactctaataactcttcacttgtagtaccttcgctcggttccatttttgtaactttgaaaacaccttttgttaatgttcctgttttgtcaaaaacaatatattttacatcatttaaagcttctaaatagttactaccttttactaacacaccacttttagatgcaccaccaatacctccaaagaatccaagaggaatggatacaactaacgcacatggacaagagattactaagaacactaaagctctataaatccactcagagaatgtagctccttctaaaataagtggtggaataaacgccatgatcgccgctgtaataactacaactggagtgtagtaacgtgcaaacttcgtaataaagttttccgttggtgcttttttactgcttgcattttgaactaaatctaaaattttcgatacagtggattcaccgaattcttttgtaacttcaattgtcaacacaccgttttggttcacaaagccacttaatacatcatttccaacttcaacttcacgtggtacagattcacctgttaatgctgaagtatctaccattgatgttccttcaattacttttccgtctaacggcaccttctcacctggcttaacgataatataatcgccaatttgtacatcttctggtgatacttgtttcgtttcatttccaacctttacattcgcataatcaggacgaatatccattaatgaagtaattgattttcgggagcggtttaccgcaatactttggaatagttctcctacttgataaaatagcattactgctacagcttcagaatattgttgaattgcaaaagctcctacagttgcaattgccattaagaagttttcatcaaatacttggccacgagttatgtttcttatcgctctccaaacgatatctccacctattaataaataagcaaggacaaataacggaattgttaccatttgtggtaagcccgctaatgcagcaattgctgtcaaaattccgccgaccactaatctccctaccatctttttcacatttgcttcaccatgatcgtgactatgtccgtggtcatgaccgttcttctcttcacgaacaactttcacatctggttctaacttttgaacgacatttgttatatttgctacagtcgcttctagttctcttttattcgcaacttctactcgtaatttcttcgatacgaaatcaacagttgcttctgagacagctggcatttccttcactttattttcaattttcattgcacagttcgcgcgatctaaaccttctaatataaatacttctttagcaattttatttttttgttcttcttgaactttaatatgcggttctaattttgtaacgagttgttttgcttccgtaacaacttcgttttctttattttgtgctgtttctaagatcattgtctttgttgcgaagtttacagagcaagaatttactccttctatattcccaacacctttttcaattttcattgcacagttcgcacaatctaaaccttctaacatcagtttctttttcaccaatgcttcagccatcgttctccctcctcgcgttcttttattcttcttcgtttacgtgttcaaacgcttgctcgaagatatgaattacgtgctggtcagctaacgaataataaacaacctttccttctttacgattcttcacaagtttcgcttgctttaacacacgaagctgatgcgaaatagatgattgtgtcattcctaataaataagctaaatcacaaacgcacatttcagcttcaaatagcgcatgtaatattctcgtacgtgtacggtcacctaatactttaaatagttctgctactttacttaaactttcatcagttggaattgtttgttttacttgctctacaacttcttcatgaattatcgtttgagaacatgtctcttgtggtgtttctactttatttccagccattatagctcacctctttaattgaacatatgaacaatcattcatatatcttatactcttattatatgagcgcccactcatatgtgtcaatgaaatctgaattttttttatgaacattccgttcacattttaataagtcgtatacatatttttcgcactctctatattctcatacaaaaaaggatgcacaattcgcacccccctttttacttacttttcatttttcaccgcatccacaattaaagaaacaaatcctaaatgattatcccgatttctatggtcaaaacgtttcgaacgataaataaatccatctttctcattccaatcattatagtgaaacttaccattctcatcacagtattctaagagccttacttgaaaacctgctgattcaaacatggacgtgattgttttatagctatgaacaattttatgacttgctgcaggatgatctaatggaccaggtccacctacttgtaccccttgctgatattcttcatctggaaaaaatgcatctggtactgcacaacgaatatatccattctccattaaaaactcataacaaatttttgcagcttcaattccttcttcatatgataaatgctcccatacatgttctgccaaaattactgataaagaattaggttgaaatttatcaagccaagcttctctccgtaataaatttaattcttcttcattcgtatgtaaccaaccagggttattattataaccctctgctccaacaacaacttttgcttcttccatttcgctcccacccttttttcatattccgacagaaaaattcgacaaaataatatacattccctttatttcaacaaaagaaaaagccttgcgcgctccctagacgcacaaggcttactgtgtttatatccctttaattagcttgttctaaattatcctgcgaacttccatcgtcttttaaatgactatgttttttcgaataaacaaagtatacaactactccgattgctaaccaagcaccgaagtacatccatgtttttaatggtaggtttaccattaagaatagacaacatgcaattgaaataatcggcaagatcggtacaagtggtaccataaatccacgttgtaattttggatgtgttttacgaagaataataactgacacaccaaccatcgcaaatgttaacaacgctccaatattcgctaaattcgacaattctttcaaatcgataaatccagcaattaaagcactaccaattcctgttaaccaaactgtaaatgttggtgcttctgtctttttattaattttcgcgaaagattctggcaataaaccgtcacggctcatagcgaagaatacacgtgtcgttgcataaatgtaagcaaaaattactgccataataccaattacagctccaattgcgattataccagctactttatcttgtcctacaacttctaacacatacgccatcgcttccggtacatctagctctttatatgaaaccatacccgtcataacgagacaaactacaacataaatgattgtacaaatgactaacgaagcgataataccaatcggtagatcacgttgcggattttttacttcttcagcagaagttgctaatgcatcaaatcctaagaaagcaaagaatactgctgctccccccgcgaaaactccacttaaaccatacggtgcaaatggtatccagttttctggtttcacgtagaatacaccaactgcaatgaataaaacaacgataccaattttaattaataccattatgttattcactcgtttactttctttcgtacctcttgataataaccaagttataactaatgtaacgataactgctggtaaattcactataccaccttgagacggaatcgttagcagtgcttttggaatttcaagccctaatccactcactaagttatggaagtaaccagtccatccgccagctactgcggcagtcgttacaacatatacggatagtaatgtccatcccattaaatgagctacaaactcaccaattgttgcatatgagtatgtgtacacactacctgaaacaggaagtgtagaagcaacctctgcgtaacataatgctgcaaatccacaaacgatggctgcaatcatgaatgaaaaaataactgctggaccagcatctcttgctgctactaatccagttaatactagaactcctgtaccaattatcgcaccaatccctagcattgttaggtcaaatgcccctagcgttttcgtcaaagttttacttttactttcccctaacaattgcgtaacggatttctttttaaataggttggccacgatgtatgcccccttttgccaagaagagctaagagatcttcactcttagcccttatcatgttgttttatatattgttcgattttgttttgtataatgcttctattagcaagatactgtttctgcttctaataattctttagcacctttgtactctacaccgtgagcttctgcaactgcttcgaatgttacatagccatctaatgtgttaataccttttagtaatgcagtgttacctaggcaagcttctttgtagcctttgttagcaatttgtactgcatatggtactgttacgtttgttaatgcaagagttgatgtacgtggaaccgcacctggcatgtttgcaactgcataatgaacaacgccgtgtttttcataagttgggttatcatgagttgtaatacgatcagttgtttcgaaaataccaccttggtcaatcgcgatatctacaacaacagaacctggttccattgatttaatcatttcttctgttacaagttttggagcttttgcacctgggattaatactgcaccgattacaagatcagactctttaacagcttctgcaatattgtaaggattagacattaaagtttttacttggtttccgaaaatgtcatctaattgacgaagacgttctgcacttaagtcgatgattgttacatccgcacctagtccaactgcaattttagcagcatttgtaccagcttgtccaccaccgatgattgttactttaccacgtttaacccctggaacacctgcaagtaagatacctttaccgcctttatttttctcaaggaattgtgcaccaatttgcgcagccatacgaccagctacttcactcataggtgcaagtaatggtaatgaacggttttctaattgtactgtttcatatgcgatagaaacaacttttttctcgattaaagcttttgttaattctggctctggagctaagtgtaagtatgtgaataagattaagccttcactgaagtgtttgtattcgctttcaattggttccttaactttcataaccatttccatgttccaagcttcttcagctgtatcaacaatttttgctcccgcttccacatactgagcgtctgtgaaaccagaccctaaacctgcacccttttgaatgaatacttcgtgattgttacgaattaaatgtacaacacctgctggtgtcattgccacacggttttcgttgtttttaatttctgctggtaccccaatacgcataatgaaatgcccccttataattaacagaaaaaagagattcttttttctttttgtaataattaataacttatgtccttattctagcataacttaaaagttatgaaaacgctaacataccattttactaaagtttttatatttagaatagtgtaaatatataaaacattgattctattaggtgtttcgtgtcatttcattatctttcactctatttttattatactgcttcaaaataaacagcaatcatttattatttgacaataatgtaacaatgtaagaaacctaagcgataacgtatacatatacagttattactttactcaatactttagagatatattcttttcacaaaaaaacagctactagcatttagccagcagctgggtaacttataaataacttagaaaataaatcatctgtcgtttcagtaattttatcaaacagatcactttcttccgcttcttgctcttttaacatcttaattgtttcacgtgcatcttcagggtaatcggttatgataccatctacgttcaacttataatatgcctttaaattttccatatcatttactgtccatacgtaaattggtttgtttaacttccttgcttcttttactaatttcttatttaacatatattcttctgctacgtaaaagtcagccttcacattctttaagttagctctacttgcatacaatatataccctacttttatatctggatttgcacgcttaaactctttaataagtggatagtgtaacgtttgaattacacattgcttctcaaattcattatctttaatcgtttttaagactttgtttacaaaatctttttcgcccccatgaagcttcacttctatattaagtttgattttgccatttgctagcttaatgatttcatcaagtgtacttatttgtcctgaaagtccatcttgactaagggtaagttgccttaactccgccatcgttaaatctgacacatgcacattggcatttgcgagacgtttcagcttcaaatcatgtataaccgctagttcaccgtctttcgtttgtaatacatctatttcagcgtagtctgcttttgcatcaatcgcaccttgcacagcttctttcgtattttctacgccttttgatatatacccgcggtgcgccataataatcggttctttatacgaatttgaaataaacgttacaatgaaggcaacgaccattccggcagtaataattcctacaatgtatacgccaatgaatttccaacgatgtttttggaaaaaacatttatctgctttcgttttcgaataatctaatccttcttctaataaaacatcctcaaccggtaccttttgtaagtataatcgcgtaatcgccataatataaaatggcgtcacgataaagctgaataaatacaatgtgctcgttaaaaatacagaaatcgttgattcagctaataatgcaaatgttcctttcgggtttgtaaattcataaacaccccataggcacaataaatatattcccaaaaacacgacatatacaattccaattgaaataaaaaaccctactaaaaagaatagtactttaaaaaagctttcctttactaaagttgcacttttacgtgctgccacgcgaaatggtttttgctctaaaacaacaataggtagaacgaaaatccatcgaagattcaaatacgcgactacagcaaagaacgtgtaataaccaacttgtcccatcgttgtcttaaacagttctcctgtaataaagttaggaatttgaatttgcgggattaatgccgtttcatatcccatatttaaaagaggcaacaatacgacagcatataaaataaatcctggtaagcaatatgtaaaaagagtaggtaaatacgttaccgttttatataaaatcggacgtaatttcaccttctgtcttttatgagcgaaatacgaaataataataagcaccgcaaattctgtaaagataagaaacagtgctaacaatgataaaattacgattgctaagatcccataaggcgtctttaaaaacgctaataattcatcatttgtcgcatttgcataaccaccaaaatacaataacttattaaaaatgattccaaatagtggaacaaacacaatcgctgctaataatttataagcaagttgaaaagttaatacattccaaaaagcaaatttaactgtttgaaaggaatgtcctattactcctggtatagatagttttttacggtgttgcatatattcctccacattctaaaacgatatttgagatggattccatatttccagttctaatccatctttttaataataatatattccgcttaacatgaacactcttatacatataatgaaaaaagtgatggctacttcccatcactttttcatttattctattttttctctagcccttgtccaaatgctttcaagaagctaaaaccgaatgtaatagctctattgatatctggatcttttaatactttaaagaaatccatcacttttgtttttttaccactatttaattcatctgttgcaaattgcaatcctgtaactaaactggacgtaatttgcttcgttatttctgggtcaactgaagataacgcttctcctgcccccatcatattgttgagtgcatttttaactggttcacgatttaattgctccacagcgatttttgaaacatcttccttcgcagcaagtaaactaatcgctgcatctaatatgccagccttctgcaactgtgctaaaagctgcatcgtttcttctactgcttcacgattattagatagctcatttagaagttcatctgctaattgctgtttctgttcttcctctgttacaactttctttttaattatagtaatttctttcgccactatctccgccccctagtccacaagtgatacgtattgttttctttgccatttttgctggatttcaacaccattttgcggattacgctttttatctctcgggtttgaagatggtaacggacgattccctttttcacgtagtacacgcatctttaccatcgtttgtttgtacgctggtgtacacgtataaagatctgtcgccgttccagttaaaatattgattgcctcttcatttaccgttgcatgcatcggtaaatatagctctttccccgttacacgatctgtaacaagtgcctgtactttaattttcccaaatggtgatgctaattctacaaggccaccatctttcacattgcgctctagggcaagttcaggcgagatttcaacgaacacttcagatactttagataaaataccagccgatttattcgtcatattcccttcatggaaatgttctaacatacgaccattatttaaaagtaaatcatactcatctggtgctacaactggtggtacccattcatctaatgatagacgagctagtttatctgggaagttaaatccgtccacatataatagcggtgtatcgctaccatcatggctaccccaacataaactattccatccttctaaacgatcgtatgttgcctgagaatataaaggtgcaagcgatgcaatttcatccatgatttcacttggattttcataattccagtccccgccaagtgcacgagctactttttgtaaaatccaccagtctggctttgaatcaccaagcggcttcaatacttcatataatctttgaatacggcgctctgtattcgtaaatgttccctctttttctaagcttggtgctgccggtaaaataacatcagcaaaacgagctgttttcgataagaacatatcttgaacaacaaggaaatctaaattcgctaaaatatgttgtacatggttggcattcgaatctactaaagccatttcttcacccataacatacataccacgcagttttccttcatctgccgcaagtaacattgcaatattatttaaacctggtgctttcggaattgtagtaccgtatgctttttcaaatttcgcacggagcgcatcatctgaaaccgcttggtaacctggaagccagtttggtaatgttgccatatcacaagcgccttgtacgttattatgtccgcgtaatggatatgctcctgcaccaggacgacgatagttacccgtaacaagcaatagatttgaaattgctgctgaagttgtacttcctccagtattttgagttacacccattccccaaagtacacaagtaccatctgcttcatataccatacgagccatttctttcagattttctttcgaaatccccgtaatttcttctgtataatcaagcgtatacttttctaccattttgctatattcatcaaaattcttcacattttcagctatgaactttttatcgtgccaatcttgatcaataatatatttcgtaataccagcgagccatacgtaatcagttccttggcgcggatgaatgaataaatccgcacgctctgccatttcatgtttacgaaggtctgccacaattaatttttggtcatgtaatttatgagcacgttttacacgcgttgcaagtacaggatgtccttctgttggatttgctccaacgataatgacaaggcctgcttccgcaatatctttcactgttccagcgtccccgcccataccgacagttttaaataaaccgtctgttgctggagattgacaataacgggaacaattgtctacattattcgttccatatatttgacgggctagtttttgcataagataattttcttcattcgttactttcgaagaagaaataaatccaaatgcatcacttccatattctgatttaatatgctgcatattggatgcaacaacttccagagcctcttcccatgaagcttcaacaaacgtatctccttggcgaattaatggctttgtaatacgatcttcactgtttacaaaatcccatccaaatttgccttttacacatgtggaaataccgttaaccggcgcatctgaaacaggctgcactttcaaaatgtggcggtctttcgtccatacttcaaatgaacaacctacaccacaaaatgtacaaactgtttttgttttattcactttcgtcttacgcatcgcagcctctacttctgaaactgctaaaatactactatatcccggctctacatcctttacaaaatcaatcatcggatctaacacatccggtttcaatcctgtcatgaatccagcttcacccagcattgttttttccattaacgcattacatggacatactgttacacactgcccacaacttacacaagatgagtcatttatacttacaccattgtcccatataacacgtggacggtctaagctccaatcaatcgatatagtttcattcacttgtaagttttgacatacttctacacactgcccacaagcaatacattgatttggatcatatcgataaaatggatgtgacatatccacttcacacgcacttacttttggctcatacggatatttctgttcctcaattcccatcatatgtactgtattatggactttacagttaccattattgttatcacaaacggtacaatacaatagatgattttctaatattcgatccattgcctcagtctgtgcctcttttgcacgctgggactgtctttcgatatgcataccgttctctaatttcgttgaacaagcacgcaataactttccatttacttctacaatacacgtatcacaagtttgaattggatctacttctggtacatgacaaatttgaggatgttccaaattactctcgttaaataattgtagtatcgtcttttcacctgatgcagaaaattctttaccatcgacggttacacggactgtctgttctgccatagtttcccctctccttacaaccaactgtacaacacaattatgaatccgttttcaaaatcgcattactgtacatatttttgaaacgctctacccaaatactttcttatgaagtcgattctagatgttataaggtataactacgaaagcttgaaaatatcactattctacagttctattatatcgtacatatacaataataaccaaaataatctgtgatcttctttttaataggtgtttttattttttccattgttttatgataaatgtgggagagaaatacatataaaaggggaattaaatatggggcctacgcaagagacttatacaattgtacgttatcaatctggtacattttcaaaacaacttgatgagattgttacagaatctcctattactattaaattgaatggtgaagaatatgtaacagtcgtatgcacaccaaattatattgaagatatggtaattggttttttaatttctgaggggattatttcttcctataaagatgttgaagaactatgggttcaaaaagataacggaattgtccatgtaaaatcatcaaaagtgaatccgctctatcaaactttatataataaacgatacatcacttcttgctgcggaaaaggtagacaaggttttattttcgtaaacgacgcagcaaaagcaaaagacttacatgatatacatgtaaaaattactcctgaagaatgctttcatttaatgaataccttgcaacaatcttctactacatttcgccaaactggcggtgttcacaataccgcgctatgtgatcgaaacaatatcctcctatcaagaatggatattggaagacataatgcattagataaaatatatggtcattgtttgcgtaacgatatatccattaaaggaaaaatcatcgcatttagcggacgtatttcatccgaaattttactcaaagtttcaaaaatcggatgtgaaattgttctatctaaatccgctccaacaaaactggcattgcaacttgcccatgatttaggcattacagtcgtagggtttattagaaatgaatcttgtaatatttacacacatccaaaacgaattgatggctatcaatccaatgtttaaaaaataactcctcaatcgaggagttattttagttataaaaatgtaacatattaaacacttgaatagttaacaaagttaatatataatttcattacataattaaaacaaaacattgtagcatatatcttttcattcttttacaaattaaaagagaatactaacaaaacatatactcaatcttataaaagtaatggatttatttgaaatccaccagggaggttacaactatggaaattcgcttattaacaacagaggacgcagaaatatatttaaaagtttgtatggaaggtttaacgaagaatccggaagcttttagctcttcttatgaagatgttcttaaacatgaaaatcctgtggctgctatggctaaacgattaagcaatccggataagtatactctaggtgtcttcaaagataatgatttaattggtatcgctactttagaaacaaaaccatttattaaacaagaacataaagcaaaaatcggttccgtttttgtttctccaaaagcgcgtggccttggagcaggacgagctctaattaaagcaattattgaaaatgccgataaattacatgtagaacaacttatgctcgatgttgtagttggtaacgatgcagcaaaaaaattatatgagtcattaggtttccaaacttacggcgtacaagagcgttcattaaaacataacggtcaatattgggacgaggaacatatggttctgttcttaaatgattaatacttcaatataaagtgaaactttactcagtgggtgatttttccatcctccactgagtattagctgaatcaatcgggcttttacgggcagttatcgcccacctaactccctcgcattcgctgaattttaagatgggagttactgcccacaaatagcggggtagttttccaaaaacatctttcttaataagaaagatgtttttttgcattacaacaatgtaatcttcatgtcacctttatcgatcgtaccaatccttaccatttattatactaaaaatataaagtgaaactttactcagtggggaactacatcccacgctgatcgcatgtacttgatatatagaggagaatgtgacatgaaacaaaacaaacgagctatgcttttaatatttactacagcaattgtaacttctgggttagcaattttaccttggtttatcatataggaatactcccctaacaatgaaaaaagctgattgcttcttaagaagcaatcagcttttttattttataaaatccctaaaattttatttacacaacttataataataaccatagatacggcaacacacatgacaaccgtattacgatcttgcttttctttttttgaaatttcttcttttggattcatgtgtatgatctccttttaaaaaaagtgtgagataggaaatttttcttatccgatgcgaggtgaatacgaaaaccctctctatctcacatacacaatagaatggaattgtcattttataaataaaatgacatgacgttatgtcgcaacatagggtattttgtgtcgctacgttttttattataaaaaatagttgtgcaaaactagtgcattttttatgtcaattactccgagcgaaaaaatcatccctccattcaatcacataaaaagagttttttattattttcatgtaaactatacaagtagaatgaacagtttggggtgcacaagattatggtaaaaattttattagtagacgatgaagaacgtatgttacgattattagatctattcttaagccctcgcggctatttttgtatgaaagctacctctggccttgaagcactaaaattaatcgaacaaaaagaattcgatattattttattagatgttatgatgccgaatatggatggatgggatacttgctatcaaattcgtcaaatttctaacgttcctatcattatgttaacagctcgcaaccaaaactacgatatggtgaaaggcctcacgatgggcgcagatgattatattacaaaaccatttgatgagcatgtattagtcgcacgaatcgaggctatattacgccgtacaaaaaaagatggctttgttagtttcaatggtattgagtgggataaaacgaaacataccgtcacagtgtacgatgaaaaaatctcgctaactcctatcgaattttcgttactcggactatttttgcaaaatacaaaccgtgcttatagccgagatgatttaatcgaaaaaatttggggctatgaaacagatatcgaatatagaacaattgattcacacattcgtaatatccgtgataaactacgcaaaaaaggatttccgattgaagattacctagaaacggtctataaagtcggatataaatggaaaagtgaataattacttcggtcagtgggaaatcgtataccactgactctttattatgaataaggtatggtgagaaaatgagtaaactttcccttaaaattgggacatactttttaatattagctttatgtattgaaacaattgctttcgtatctttttataaaagcctttcaacaatgcgtgtgaaagaagaaaccgatgctctattagagaaaggtaatcggtatcgtgataagattgtaaaccgtgcaagatggaatgatcattctaaacaacagcaatacacagaacgtcctaaacaccctcggtatcaggatttcactatcgagcatgcggctgaagatttaatcggttccgaattaattgctaatactgatatcacaatcattataactgacaataacggcaaaattatttctaactcagaacccataacgaaagaaatgcaaaaacaacttatttgtaaaacaaaatctattccaaaaagcgggttaattgtagaaagaaactggaaaaaatcaaaattcatctcaacagtaagtccacttgaaattcaaggatttcaaggtaatttacatatgttattaaaaacatctttcttagaaaagatgttacttaaactcctgcatcaatttcttatcattagtattttgacgattattttaacaactatttctgtctttgttttttctaaatttattacagatcctcttataaaaatgaagagagcgacagaaaaaatgtcaaaattaaacaagccaattcaattaggtattaaacgaaatgatgaactcggaagtttagcaaaaacaattgaagatttatcgagtgagcttacgtatatgaaaaaagagcgcaatgaatttctcgctagtgtcgctcatgaactattaactccattgacctatatgaaaggttatgcaaaggtagcaaagagagactctttaacaaaagaggagcgagaagaatacttacaaatcattgaggatgaaacggatagtgtaaccgatctcgtccaagatttatttatgcttgtacaattagaacaacaccaatttgttataaaaaaacaaaaagtgcttcttcagccatttttagaacgaatggttgaaaaaacaaaaacaacattaacgaataagcaaatgcaacttcatgtatattgcaaagatgatttagaagtttgtatagacgaaagacgtatggaacaagttatgttaaatttattacacaacgcttatcaacattcgccagaaaacacatccattacgatacgtgtactcatggaaacatattcttttacaataagtgtacaagatgaaggtgaaggtattcctgaagaagatatcccgcatatttttgaccgtttttatcgtgttgataaatccagaacacgagctacaggcggaaaaggcatcgggctagctgttgcaaaggaaattgtagaattgcataacggttctattctagtaacaagccaattagaagcgggaacaaactttataatcgagctaccttttgaataatatgcgtgtgaaaacaccagtagtagtaaacactactggtgttattttgttcataaaaacagctcatataagctaagcttttgaaattattcttatttcaatataaaataaaggtacatttgcaaagatttggagggtgatataattggatatccatgtattaacaaaagacgaagcagaaatttacttagaacttcgcgtagaaggattaaagcaaaaccctgaagcattcagctcttcttatgaagatattattaataaagagtgtgcgattgaatataaagcacaaaaattagcacaagatgaaaactatacgctaggtgcatttaaagatggaaaattaatcggggttgcaacgctggaaacgaaaccatatgtaaaacaagaacataaagctaaaatcggttctgtatatgtatctccaaaagcacgcggacttggagcaggaaaagcacttattaaagaatgtcttgaacttgctaaatctttagaagtagaacaagttatgcttgatgttgttgttggcaacgatggagcgaaaaaactttatgaatcattaggttttaaaacattcggtgtacaagaacgttcattaaaatataacggacaatattgggacgaagagcatatggtcttattcttagatgaaaataaataataaaaaacatcctcatgtttggaggatgttttttactttcttgtaaaccatgccgtgtgtaataattgaatcgctttcgcaatctcttcctctgataatatcgcaaacccaagtaaaactacactctcaggcgccgtaccgtctttatagtacgtagacacaggatatattttgatactatatttcgcagcttcttgaattaattcttcttcccgcattccattatgcacttttaataaaatgtgtaatcccgaatcttctcctatcactttaacacgattagagaaatacttctctatttcaaaaacaagtcgatctctcttctttcggtagacgacacgcattttatgaatatgtttttcccaatagccttcatttaaaaatcttctaatcacttcttggtccattcttgaaacactttgtgtgtaaaataaatattgctgttgatactttttaattaatttcttcggcaacaccatataactcatccgtagcgatggcaataatgctttagatagcgtccccatataaataactttcccctctgtatctaacccttgcagcgccggtataggctttccagaatagcgaaattcactatcataatcatcttcaataatatacctgctctcttctttctttgcccattgtaaaagctgcatccttctcgtaataggcataatcattccatatggaaactgatgggaaggtgtaacaaatacaacattcgcattgctattttctaaatctgcaatacaaattccatctctatctaaagataacatttggactcttgcttctccctgttcaaaaacaaccatctttctatgataccctgggttttcaactgcataattgcttccctttaacaattgaaacaatagtttcactaatatttgtgttcccgctcctaatacaatttgactagctgaacaacgcacacctctagattcatacaaataattcgtaatctcttctcttaagcttgcttccccttgagggtgtcctagaaagagaagttcgttattatgcggctgccatacttcatttacaattttccgatacatattaaatggaaaagcatttgtatcaattcctgtttgtgtaaagtcaaatttataacgcttctcctgaaacgggacttcttctatcctctcttcgctatcctctacatgaaccatttgctcaatcttgcatacaaaataaccttttctcgatatcgactcaatataaccttctgcaagtaattgttcgtacgctgcctctactgtatttttacttacttgtaaatgtatcgctaactttcgcttagccggtaatttcgtaaaagggacaattgatccatctttaatctctttttttatatactcatacaattgcacatataatgcctttttactattcatatttaaattaggcgttaattctaacatagtatctgaccccttaataaaactaaaatctgatactttttacagtaccagattatatatataattccttttatcatgtcacacatcaaaaatcaaatactggagaggagaaacatgataatgaacaacggtagacgtatcggacttattatgattattacaggggctacattatggggattatctggtccaatgattcagtggctatttcagcatactaatgtatcctcaattgattttttaacaattcgattgttgcttgcaggaatatttattttgtctttcttacttataaagaaacaaaacatatttcaaatttggaaacaccttagatattctatacaacttattattttttctattctcggcatgctcggtgcacaatacgcctttatcgaaacggttcatattagtaacgcggtcactgcaacgctatttcaatttctaggtcctgttcttattaccgtgtatgttgcatttgaacaaagaaaattccctgcttccatgcaactattcgcaattatagccgcgctaataggaacatactttattattacaaatggctcaattgaaaatattgttttatctaaagaagctattatttttggactattaacagcaatcggatttgcattttatacccttcatccggcttctctcattaaagaatgcgggacaactgtagtaattggttggggaatgttaatcggaggaattgcactacttatttataatcgttcattcgggtggaatcaattttcacaaacccttacactgaaaactttttctatgcttattcttatcattgttagtggtaccctttctttccttctatatatcggtagtcttaaatatttagcagcaacagaaacaagcattttatctagcattgaaccccttgtagctgccatcgtttcaatcacttggctaaatgaagcttttggagcataccaattattaggcggcgtatgtatcgttctgtccgttatttttttgacgatgcctcaaaaagaaaccgaaccaacctatacaacggaacaaatataaaatgaaactttaattagtggggctatctcccactgattattaacctacaccaatcgggctttacgggataaaaaatgtcaaaagaggtcgtacaaaacttacgacctctttttatactttaaaggaattgtcccgccttctagcaaatacaattacactaacaataaaaactaggagtgtggcaccatgaaaaaaatcggaactatgctacttctctccctcctcatcactggatgcacacaaactcaaccggattcaaaagaacaaaaaaaagacgtaatagcaacttcatccactcaagtgaacgcaccttccttctttcaccttagtgttttaaaagatgtaaattgggaagaagccccctcattcatagacggaaaaatacctttaaaaggcatcgaaggaaaaatcgcaatggctgatagtcctattatcgcaaatgaacaaaatgaaataatgtggtactttctagattctgaaatacctactggaaaattgtctattattgcgctaaaacaaggatctgtaactccaacaccagtactctttcaaaaagaaatttccaaacaaacttggactacttcaaatacaatcaattctactacaagcgaactccctctcgctatgtcactaccttcatctggattatggttattaaatatctatgtgaatgaaaaatattatgatcagtttgtaatcaccgctaagtaaagtgacaaaaataaaccactttcttacaacaatgtaatttctacgtcatgtacttcgatagttgaattatctctcttctcttatacttaaagtaagaaatgaagcgaggagagatgagagatgaaaaaaatgatagaagtaatcgtagcagtaactgaggttttagtgaatggtaaacaagttgcaatggaattaaataaatagtgaagaaacataaataattctacacttcttcattattttgatttcttatctcaaaaaagcagtgccttttaggcactgcttttagctattaataacgtggtattttcgtaatttgtgccacgcctgaatcaatagctgctttcgctactgcttccgcaacacttggaacaactcttttatctaatggattcgggattacataattcgcattacgttcttcatcagtaatgatgttagcgatcccatatgctgccgctaatttcatctcttctgtaatatcagttgcgcgcacatctaacgcaccgcggaatattccgggaaacgccaatacattatttacttgattcgcataatccgagcgcccagttcctactacagctgccccagcctctaatgcatcctcagggaagatttctggaattggattcgccattgcaaacacaattgctttctcattcatcgtctgtacaagttctttcgttaatacgttaggagcagatacgccaataaaaatatcagcttggttaatcgcttcttttaacgttccacgcacatgttcacgatttgtcttttttgaaacttcaatttgcgcttcgttcatccatgtttcaccttcacaaacaataccttctaggctaactagcgtaatgtgctttgcaccagcctttaataataattttccaattgcaattcctgccgaacccgcaccgttaataacgattttcacattatccatttgtttgctaacaacttttaatgcattaataacagctgctaaaacgacaatagctgttccatgttgatcatcatggaatacaggaatattcgtttcttcttttaatcgtttttcaatttcaaaacaacgcggtgctgcaatatcttctaaattaatccctgcaaatgtaggctctaaatttttcacaagggtaacgatttcatctacatccgttgtgcctaaacataatgggaaagcatctacattcgcaaacttcttaaacaaaatacttttcccttccataacaggcatagccgctttcggtccaatgtttcctaaaccgagtaccgctgttccatctgagacaactgccaccatattaccacgtgctgtatagtcatacaccgtttcttcatctgccgcaattgctttacaagactccgctacacctggtgtatacgtcaggcttaaatcatccgctgaatttacttctactttacttgtaatttcaatttttcctactaattctttatgcaataacaatgatctttcattaatttgatttgctaacatacttataatctccccttaatttgacaagctagctatatgaatatagctagcttgtttgatcatgaaaacatctttaataatattgtcgctgttacaaccattgccgctccgcctaaacgagtcgaaatttgcgcgaacggcattaattccatacgatttgaagctgataaaatagcaacatctccagttccacctaaaccgctatgacatccagttacaatcgctgattcaactggatacattttcatcactttccctacaagaaaacctgatgctaccattgtaagaacaaccgatgcgcacacaacaacatatcctactgaaagaactgctgctacgtcttttaacggaatatatagcaatcctaatccaaccattaaaggccaagttaaattcttcgaaataaatttatataaatggaatgctccttgctccatttttgctggcattaatttaaagtatttcacaagcgctgctgagaaaatcataatgattgccccaggaataccgatgaacttagaagcaaatcctccgaagatgaagaacgtacacgcaattaataaacctgctcccattaatgagaagtcaattggcttctctgtattttgttcttttaataattctgcttgattgtctgttttcactaatacaccgttaccactaagctccggtttcttctcacctaaacgcttcatataccctgcacttacaattgcgaacatatttccaataatagctgctggaataagctgtgatacaaacgttgctgatgattcatttaaaatatcactataagctagcgacaatggtaaaatcccttccccgataccaccactcacaattggtatgatgataaagaagaatgtgtgcttcatttcaaatccaaataatgaaccgaccaataatcctactgctacagaagctaacgtccctactactaaaggaataaacatacgaacgaaaccttgtactaacactttacggttcattcctaaaatacttccgactactaaacaagaaatatataaatataaaaagttcgattttttcattaacatagtcgcagcttccattgaagctggattcatccagttaaaaaatacaagtaatgatggaataaataacgaaagtattgctggaccaccgatattttttaaaattggaattctcatcccaatatcgcctaagaaaatccccatgatcataataactgcaaatccaccaatcatatctgctggcaatttattatatacagatgccccataaataatagcagccaatactacatataacggtaaaggtataacaccgatttttacattcataattttagaagcgaaagattctctttgtacttcatttccttcagaaaatgataccgcttccacattcttttgaattcccatatggcaccccctcgttttcttaataacaatattaaaacgctttcaatagtaaaaatagtttttgtaagttttgtaattgattttgtaattaaaaaaagtataagcgacttatgttaagtcgcttatacgtaaaactctattttcttttgatcaacacatcttaatttacttacaggtcttcccacatgttggtacatcatttcgttttctaacaccccaatgtcagtcagaaacattacatattttcgaatagaaactcttgaaattccaactaattgtgccatttcatctgttgtaaatactcttccattcagagactcgatcttctgccaaattaattgcaacgtttgcttcgttaacccttttggaagctctttcgtcacagtaggctctcttttttctttttgtaaaattaatgaatctaattccgattgactaattttttgttgttctttcatgaaagtaagtttttctcgatatatagttaatgcctttttaaatcgttcaaatgtaaatggtttaattaaataatctactacgccatattgtaatgctttttttatacttcccatatcatgtacagctgaaatcattataatatcgctttctttttcttggttccggatatacattaaaagctcaaaaccagtctcttcaggcataaaaatatcaagtaatactaaatctactcgtgatttctctaatatttctatcgctgactttactgagttaactgcttgaacaagttcaaatcctcctacttgctctaaataatgcgtatttaacattgctaccatcgggtcatcttctacaattaaaactttaatcatatttgcctctcatccctacctttaggtatttcaatcgttatcgttgttccctttcctactaatgaatgcatatgaatttccccatttattcgctgtatactttcttttacaagatacaaaccataaccgcggttatctccctttgtggaataacctttcgtaaataattcctctatttctttttcttgtataccttttcctgtatcttgcactgtaatagttagtatatccccatgttgtatcttaacttcaactcgcttcttttcacaattcgtaactgcctctaatgcattatcaattaaatttccgacaatcgtaataagttcatgagtaatactttcaacatctatttccggcatgtaagaatcttcacttataattaattttatatttttctctctagcatagctgagcttacctagtaaaaaaccagcaaatactggactttttattcttttcataactccaccaatttcatattgatgctctgataccatgccgcttatatacttctgtaattcttcatactgtttcatatgtgtaagccctaatacgacatgcatcttattcataaactcatgagattgtgcccgtaatgcttctgcatatagtctaataccagttagttcctctgctagttttctaatctctgttttatcacgaaatgttgcaattgcaccaactatttctccttttacatataaaggaactcgatttgtcacaatcgtaattccataaatattttgttcttcgtttaattgtacttctcccgtttgcaatacttcttttatacgtgaatttggcatatacaactcaacatctttaccgataaaatcttcttcaagtccgctttttttaaatagacgtttcgcttcattattaattaacgttactctagcctctttatctacagcaataataccttcctttacagattgtagcatcgtatttctttcttcaagaatttttgctatcctgtgcggctcaagaccgaataaacttttctttatatgtctagctagcaatattgctcctataattccgactaatacacccactccgacaccaatataaataatatgtctactttccttaactctctcttttacattatctgctgaaataccaacagccactgctccaagttgttcacctgtttcagaaaatattggtacaaacactcgcatggaaatacctaaagttccttctgctaacgatacatgttcttttcctttcaatgcaggcccttcatctcccccaataaaatgatgccctattttttgaggatttggatgtgactttcttattccattcatgtccataactacaataaattgaacacctgtgttttgtaatattctatttgtatacgtttggattgcagaggtatctgctttcccaaccaaaccatcgattacaatcgaatcattcgccacaatgtgtgcaattgtttttgctttctctgcttggctatcctccgtcgtccgttctacattatgactaattaatatatctgtcacaagtaaagaaaaaattacaactgtacaaactaacaatgtaatcgttttccataaattccatagtctttttctttttttcatcctgttaatgactcccctaattgctgaatagaaaaataagtaaggtgatattattttcaccttacttatctgctgttattatactttaaatttactagtcatcgcttgtagttcttctgccatctcagctaagttttgcgaagctgaactaatttcctccatggaattaacctgttcttctgttgaagctgcaacactttgcatactagctgtattttcttctgcagcagctgcaatttcatcaatagcatttgtcacttcatttgcatctccagcaattctcttcgttgtttctaccatttgattaacttgagaaacaatatgtgtagtagaacttaaaatttccgtaaaacttactttcgtttttgttacaacatcaaggccttgttgaacttctccattcacattatccatcgccttaacagtatgttcaatatccgccttaatttctgcaattaaatttgcaatctctccagatgactctcctgattgctctgctaattttctaacctcatctgctacaatagcaaatcctcgtccctgttcacctgctcttgctgcttcaatagccgcatttaaagctaataagtttgtttgagttgcaatgttttgaattgcttcagaaatagctcctacttgctttgatttctcatcaagaagtttaataatagcatctgactcggataccgacctagaaatagactgcatttgttttgcggtttgttcaactaaatcttctccctcttcagctctttcacgggcatgtaatgaggaaatagaaattgactctgcgcttccagttacatcttgaattgctgtatttacttgttgtaatgtagccgcaccttcttcaacaccttgactttgtgactcagccccacctgatacttgttccatcgcaattgtaatttgatctgtcgcatcatttgcttgctgtacgctcgctgttaactcttcagccgatgctgcaacatgttctgctgaaaagctaatttgggtaataacatcttgtaaagacatagacatttcattaaatgaattccctaatttccctatgtcatccttggaatggattgtaattttctctgttaaatctcccttactaattttatatgccgattcagctatttttcgtaatggccctgtaatagactttgtaatgaaataaattaatatactaccaaatgcaatagcaatagcaatgacaatcaaagtcttataaaacactggattggcagcttggttaatttcttcatcgaacataacaccaactactttccagcctgttttctcatttgttgcaaagattaaattctttttatcatcttgttctgtataagacacatttccttgtttttcttcataaattggtttaatccaaggatcagtaacttttgcacctggttttctagatggatgactaacaatttgcttattttgatctaaaataactgcataacctttttcaccaatattaatcattttggaaatttttaagatgttatctaaatttaagttaattcctataacacctttaccatcttttacttctttagcaattgtcactaccatatttttggtagatgctgattgatatggtgaagtaacaattactttccctttattttcatgtgcttctttataccaagatctatctcttggattgtatccatcagccatttggataaatggttctcttataaactttcccgtctctgttccaatataaataccttctacttctggatgaagttttatatattgcgctagcttcgttcttactatttcttcctgtccatttagatatgtatcttctgttaagatgtctgcaaagtacgtcgcatcaacaaatttctcttctatattttgagaaataacagtatttaaaatcgaaatattctcctttgctttagctgtcatttgatgttcaaaatttgttttggcagtttgatatgaaacaccaccaataataattcctggtatagttaaaataataaagaatgaaatgattaattttttattgatactcatacatttaacccagttaaatattttttgcataataagcctcctttatgtaatgtggatacttgtgtcattttatacaattaacatgcataaaacaatatataatgataacatgtgaatttttcgtcaattatgcatttttgcatatccactccttatacgtattttaatcataaaaataagagaactttagcattatatatgctaaagttctcttatttcttaacagcttctactctataaaacttctcttataatccttaaatctttacccttcgccttatagtcatattactaaaactcttcgtcctaatttatttgacgctctttacataactaattgcctgacttcccatttgtacccatgcctgttcaaaggtttctctcggtacttttacatctaagctatcctcaagtggatctcgaatatatacaaattcctgatcatatccaataagtacaacacaatgttcattatacgtaatagaaacatctccactatttgtttcccatgtagtaaattcagctgcatctaatggtgcaaatgttgcatttgtgatcatgactacaggttgccctgcttttatcctcttataaatttcttctatattcttccctgttaagtctacagctttattaggtaaatatttttccgctaactgaaaaagtggcccatgatatacaccatatcccgattcagaaaatgtataaatattacctacaaatccttcatttggattcccgcgcacaccatcgtctataaaatcaactttttttatttcatttgctaatgtcatcttatccactgaaacaccagcgtattgtaacatcatcgctaagcttgtcacttcacagcctctatctagctctggtagttgctgaattaatggtacacttgataaaatgaccttttcatcattattactaaattccggttctttcccgttttgtatattgaagaatgtccacttctccccatactttgtaattccatttgtatatacactccataccgctatagctagtaatgctatacatatataccacttaaacctccgtatcactctcacgccctttttagttcgttaaataagaataaaatgcgtcagcatccgttcgaatcactggtacaaaatttagttctttttctctctcaggttgatctttttttattttttctgttagctcttgaatattcatgttcgctttatccatattaagctcatctgccaattgtagcaccttttgttcattaatttctcttaatacttgatatatatctttcccatataaatcaatatgatatttttttgcttcttcctgcactttttgttcgtacacctcttgtgctaacacttctatctcttttccttttggtgaaatacctaacttccctgcttcctctcttaccttcgttccatagatttcttctgcaatgtcctctatttcttttccatttgtcgaaatacctaatttatccgcttcatcattaattttaatcgtattaatttgattaattaaatttacaattgatgtattttctatagatatgcctagttttaacgcttcttgctttacttttgtttcatagatttcttctgacagcgtcccaacatcttttccttcaatcgaaattcctagctgcttcgcttctcttcctacttctgtctcatgaatttctttttctaacgtaatttgttctttcccttccgtttcaatacctagattctctgccttttcttctgtatgcacagcatgtatctttccattatttaattgttctttactacgttgtgtgtaatctgtctttccttttgatgtttcagaaggagaggcaccccctaatatacttaagctcattactccaatagtgaataccgtcatcattttctttttcaaaattaattcctccctcttatactttctttcccatcattcccctagtttttttaatactatacatacatctcatcgctgcttgagataacattatgattgataaaccccactcacatacacctagtctcttcttcatgtaacgaactttcttcatgccatatataatataaatagtttcttaactttgtcttaaaaaaagacgaccttgtaaaaacaagatcgtcttcttacttatattttttggtttttagggaaaatcacttcaaaacaagtgccatctccccatttgctctctactgatatttttccgtaatgcttttctacaatccaatttgcgattgaaagacctaatccagctccttctgacgtacttcttgctctatccccttgataaaaacgatcaaataatttcggaatatcttcttctttcactcctatcccgtcatctttcacctgtatgcgaatcgaactactcgtctgcgtgcaatcaatttgaatatgcccgccttcgtttgtatacttcatcgcattatctaacagtatgaccatcatttgatgaatccgctctctatcagccataaaagatacgtcacgttctacttttagtatcatttctttttcttgataagaagcaatctctttatatggagctactatttcttctaacaatttatcaagttcaaatgtttttttatccatctcaatttgattagaatcagaacgtgctagtaataataaattactaacgagttttgataaccgcctacattcttttgaaattgtagaaatatccatcgctttttcttctatcgtagcggatggtgactgaaataacacatccgtttttgattgaataactgcaagcggtgtccttagttcatgtgatgcatcagaaacgaattgctgctgtttctcccatgaattttgaataggtacgagtgctctgccagctaggaaaaagccgatacctatcgcacataaacttcctatgctacaacctataacgaggattaaaaataaagtatttaacattccttcttccgctgttatatctcgcacgatttgaactatttctccatctttttgaagcgaaaatgctctaaaatatcgtccttgtactttgatatcttgtaactcccctattttttccggagaaaacttttccaaattctcttcaaaaattgaacggaatttacgattatcgccctctattttcactattttcccattccaagttattctagttactcgcggatctccaatttggatattctccatacgttttcttggtggtattttaacatctaatttttctctatactgagccatcatttttatagattgatccacttcattataaatacgcttatatgtgtatgaataaataatactacctaatatacctattaataggataaatactaatgaattcactatagtcaaacgaatgcgtgtcttttgaaacatacttccctttttcattgttcttttaatatatatccaatacctcgaacagtttgaatatctttctgataaccgaatggttctaattttttacgcaaatgatgcacatacacttccacaatggctactgtcgtatctgaatcaaatccccaaacacgatcaaaaatttgttcacgcattaaaatcttcccgctattttgaatgagatactctagtagctcatattgtttcaatgtcaacttaatactttgtccatctacttgaacgtctttatcttttccgaacaattcaatccctttataacgaatcgtttgctgcgttgttaaactaccacttctgcgtagtaaagcgcgaattctcgcttttaattcaggggcctgaaatggcttaacgatatagtcatctccaccaaaatccaatcccttcacccgatcttctaaagaatctctcgctgtcaaaaacaggactggtgtttcaatcttttcatcacgtattttttgaattacttcaaatccatccatccctggcatcatcacatccagcaaaattgcatcatatatattttgaagcgctaaaaacaatccatcttctccatttattgccgtatctacttcaaattcatcacgcaaaatttgtacgatagactctaataacgaggcattatcttctactacaagtaagcgcatgctctcaccttccatcaaatagttcaattctatttattattacatttcttctcttcataacaaaagaatgtagttacattacgtattttcatttttaactatttccttctaaaattttgaagttttattataaaaactttgtcttaaatttagcttaataaaaaattgaaagaaataagattcctcttatctctttcaattttttattacatatacctttttactcggcaattccaaacaatttagctgaccaccgtacacagccccgccatcaattccaataatacgattactaccaaaatacactccgcactcctcactaccatgaagcgtttttgtttccgtatgcccaaatacaacaaccttttcaccgctatatccattatgaaattcattacggatccacattaacgtatatggttcagattcagaaactcgtttcatcggttcaaccccagcatgtacaaatatatactcttctgtttcaatgtaatgatctaattcttgaataaactttatatgttcctctaatacacgggagtgtaaaatcggtttttggaagtctttctcattaaccgcaatatcttcttctacaaatccatagctatataatgtcttatctccaccatttctttttacccaatggttccatgaatgttcctcatttgtcgttaacgccttaatcatcatatcttcatgatttccctttaaaatgagtgctccctcttctttcaattctcttaccttttcaattacagcacgcgcatttggaccacgatctacataatctcccagtaagattaattgatcctgtttcgcatcatattgagcttcttccaataactgttcaaacttttttatctctccatgaatatcactaataacaagaattcttttcatattatcccccctctttctaattatagttcaaaacggcagaaatttctgaactcaaatctaaaatcacatttattacaaataaaatgattatccttacaacgatgtaagtctcttgtcatccaattcgatagttgtaattactgtatttccttatactgaaagtaagaaatgaaacaaaaaacaaggagagatgagagatgaaaaaagtaatggaagttgtagtagcggtagtagaggttttcgtaaatggtaaacaagtcacaatggagttaaataaataatgaaaaggacaacatttactctagaccctttactcatataaaagagataagacttcatcatttctttgatcccttatctccctataaagaaagccgtatcccttttaaggatacggctttctcttatttttgactcgtacgagctgaaatgctaattgctctatctgttgctttggcagcttcatctaacgcttctttactattcttcccgtcatacatcgcttctaatgcttttacaactgcatctcttgattctgggaatacactaattaaagcaccttgtgttgctggagattgcttcgttgcttgcagttgatctactgttactttcaactgtgggtatttttcatattgctcttttactaatggctcattatatgcatctggattaattgagaaatagcctgttgcagtatgccattttgcttgtacgtctggcttcgttaaatatttcataaagtcccaagcaccttgttgcgtttcttctgaaaccatattcgtcatccataatgatgctccaccaataacaacaccattttgtttcgaatcctctggatacggaatatatgaaacacctacattaaacttagatgcatcaattaaatcacgaacacctgctgaagaatctaaatacatagcaacttgtccagactggaacgcggcacgaatatcatcccaacttgctccatactttccaagtgcgccagctttatttaaatcatctaacattccaaatactttctgtccttctttaccgttaaataccgccttttttgcagcatccttacggccgttttcgttatctacatataaagcaccttgtgtcgctaacaattcttcaaagaaccaaccgtagttaagcatggagaatccatattgttttacatttccgccttctttaatcgttaactttttcgctgcttcttgtaattccgcatatgttttcggagctttctctggatctaagcccgcctttgcgaaagcatctttattataaattaatactggtgtagatgaattaaatggcatagaatacatttttccatcaactgaataataatttgtaattgctttttctaattttgacgtatcgtacttatctttttttatccagctatcaattggtgtgatttttttactatcaatcatatatttcgttgtaatttcactcgattgaactagagctggcgcttctttcgttgcagacatcgttctaaatttcgttaaagactcttcatatgttccttggaactctgcctttatctcatatttattttgtgacttattatagtctgcaacaagaccatctagtactccttgtgtttttccacccatcgcatgccagaagcgaattacagttttatcaccatttttttcaactggtgctacttttgcctgtgcttcaggttttccttctgttttactatttgaacaagcggcactagataatgccattgttgctgccattaatagagcagcaccttttttaactagactcatttaaatctcaccttctcttagttatttaattgcaccttttgttaatccttgttgtaattgcttttgccctaaaaatagtaaaatcaatgttggaataacgataaccgtaacaccggccattacgcttccccaatcagttgcaacttcttgagactgaagctgcttcacaccgatttgcactgttcttactttttcatcagtggtcactaaaagtggccataaatacatattccatgttgttaaaaagctatatactccaagcgtaataaaactcgttttacaatacggaattacaacgctgaatagaaatcttatatttccaatcccttcaataaacgcagcttcttttagttcattcggaagtgtcataaaatgttgacgtaacaagaaaataccgaaagctgttgcaaaaaacggcactgtcatcccggcgaaactattgatccagccaaagttttgaatcgttaaaaagttaggcaccatcgttgcttcccacggaatcagcatcgttgaaataaacaggaagaaaattaagtttctccctttaaactgaagaaaaacaaaagcataagctgctaaacttgatacgataagttgtccaatcataacgactgtcgatacaattaaactgttatataagtatgtaaaaagtggtactttttgaaaaatattaatgaaattatcaaaagtaaactgggtcggaaataaccttctcatttgaatatcgtctggtgtcataaaacttattaaaaatgcatacagtacaggaaaaaataccattactgcactaataatgagcagcatgtataataggaaattttgtttccactgtttaacaatcatttataatgcacctttctctcagcaaacttaaattgaagtaatgtagcaagaaaaatgaaaacaaataataccattgcttgtgcacttgctgttccaaattgatgattcacaaacgcctctttgtaaatcgagtacacaatcaaattcgttgcatcatttggtccaccgtgcgttaaaatatcaatttgtccaaagctttggaacgcactaattaatgttactgttacaataaagaataaagttggtgatagcatcggtaatgtaacacggcgaagtttatataaataactagcaccatctatagatgcactctcatataacgacgtatcaatattttgtaaaccacctaatataactaaaaatgcaaaacctgtattcacccaaactgttgtaactgatacagagaatagtgcccagtccggactcgttaaccatgcgattgcaggaaggttcatagaggctaatatattattaaataatcctacacttggatgaaataaaaatagccaaatcactgcactagcagctactgatattcccatcgtcgaagaaaacagaactcggaataacccaatacctcttacttttccatttgcaatcaatgcaagaaacaaagcaaatataatactcgtaggcactgtatataaaacaaataataaagttgattttatacttttgtagaaggctggatcagagaataagtattgataattttctaagccaacgaaaagattagcttccccatgtatatcggttaaataaaagctatagtaaattgtcctaaacaatggatagaacaaaaaaatcgaaaataacaaaatagatggcgccaaaaacaataatcctattcttaaatctttcgttctcccccataattttttcttttttgacacctttgtttgaactggtaacttacttacttcgatcattatttcgccaccactttcaactcttcttcagctaccacttttaagcgttcattcgtgttttcattaaagaagcataacttttcttgcgagaataataattttactttgtcacctttgttcaagagtaactgtccgatgactttcgcactccaagttgttccatttaccgcaaagttcaatatagattcattccctaatacttctacagattgcaacgtcacttcttgtccctcctcagacagtgcaatatgctcaggacgcatgcctatgcgaattgttccttctggtaattgctttaactgtctaatagataatggaatttgcaattgccctatatgtaatacacctttttctttatttacttccccatcatttatattcatagaaggagaacctataaagcttgcaacaaattcgtttgctggttcgttatatatgtcaagtggtgttccaacttgctgtatacttcctttatttaaaaccatgatacgatctcccatagtcatcgcttctatttgatcgtgggtaacgtaaatcatcgtaattcctaatcgctgctgaatttctctaatttcaattctcatttgcgcacgtaatttcgcatccaaattcgaaagtggttcatccattaaacagattggtgcttgactcacaattgccctggcaagtgcaacacgctgtctttgtccgcctgataattggcctggtttcattttcacatactctttcagtcctaccatttcaatggcttccattaatcgcttttgtcgctcttctttttgtacttttcttaccttaagtccaaataaaatattttcttctacagataagtgtggatataatgcataattttgaaataccattgatagattacggtctttcggctctagatcatttgcaacacgttcattaataattaaatctcctgaagaaatctcttctaagccagcgatcattcgtaataatgtgcttttcccgcatcccgaaggtccaactaaaacaaaaaattcacccttcttaatatgaaccgatacgcctttaaccgctgtctcttctgcatttttatatacctttgaaacatttttcaattcaatcacaaggttgcactccttttttcttcttgtatccatacttcataatgacttgttgaaatcgcacttgctcctgcatgaattgcaatttccgcatcttctcgcgtttgaatcagcccacctgcaataataggaaactctatttcctctactagctgtttaattatagaaggcataatccccggcataatctctactgcatttggtttagtcgttttacaattttcaattgatttagtaagggataaagtatctacaataaaaatacgttgaattgttttcaatccaattttattagcatttcgaattgttgaaccctttgttgaaataataccttgtgccccgataacatcttgaatatacaaaagcgcttcctctgtattcgtatttaagccttgtataaaatcacaatgaagaaatacatcatgtccatgtttctgcaattcatatacacgctctggtaattccagcattgaaccagtcataagaaaaacttttttcggcaattttttgtatgctttgtatcctttccaatcctttatcatcgcaatataaggttctttaaacatttttccacctaactgttctatttttatccaaactaaaaacacctacttacatagaacgcctttctccttatttgaactctagggaatagagcacacctaagaaagtggcacattatatgtaagtgggtgttctcaaatgttctctaccctatttattttgttacctttactatattacgcatttattaagtcagttttgatagattgttaattaggtgttaatcaaatgttaatattcaccatattttcttaatattaatctagatatacaaataaatcccaacggcaaacaactatctttaaaatttaagtgatatgtaaattcattccatagttaataagttttagttttctcgcaacggcttgtgaagcataattattccaagaagtactataaagtggaatgcttttttcttcttttattgatatcgcccaggctgtaacaccatcagtaccatatccgttcccttgaaactccgctaaagtttccacacttgcctcagcagctacgggcgtacttctggcactgcaacaaacagaaactaccttttcattttttacaattgccaaataaggttgcctccttatttactccatttaccatccattcataatctatttttcatattcaaaataaaaatcccattcaaatacacattactgaatccatcatactaactgatttcttcattctgtctatctaaatgggattatttttcgttttttactctactggctgttgtggctgtactacttcattcgctccagctaccctcaacatatttacaatatctttaaaacctcttttttcagcgtattgcagtggcgtcagatgttccttgttagccatgtttacatctgcaccgtgatcaataagcaattgaattactttcttatggttttcactaccatttcctaatacaattgcttctaataacgctgttccaccacgttcatttgtataattcacatcaatatctgtatgctctaataattctttaacaacctctacatggccacgctcagatgcagaaataagtgctgtcccacctgacctagtcgtttctttcgtattaactcctgcattaattaatacttttacaatatccgtatatccttctctacttgcataaagaagtggattactttttttctcatctttaatttcaatattagcacctgcaccaattaatgctttaactgtctctacatgattttggtacgtcgctgcaaggacaggcgtttctccgttgtcaccttctacgtttatattcgctccatcctgaatcaacttcatagctgtctctgtatctccaagggtagctgaaagtaacaactgtttgtccattaaatttatacttttctcttctttagattcttcctgttctttatgcttctcttttttcttttcatttttcacatgaaccggtttcgattctggttcttcttgcttatcgcaagccactaccgtcattaaaagtcctaataaaatacataataaaattttttgttttctcacaactacagctcctatgaaagataatgttttcttaaccattcctccatcacatacaataactcttcttgagtacatttatccataagccctttatattccttctttaatcggattatcttaagcttatactatgtttctcaacctattgaaatgatacgcctgatggccccatcattaacattatgaagcaattagtttagcacgtttttaccgcatttgtatacatttctaaaaagtacataaagtgaaactttaattagtgggggttttgttcatccaccactaattattagcccacaccaatcgggcttttacgggcagcccgactccacctaacttctttgctttcactaaattttgaggtggggatcttattgcccgttaatgcgggataaatgattgctttaggttactatattccattgtaaccgttcttctaaaaattttacaccttttctatatttgcacctgattaataatagaaaaagacaactatatagttgtctttttctattattaatgatgtccaccatgatttcctgctttcggtttccccatcatctctttattcatttcccatttatgctctgctagctctttatatgaaagaactttccccttatagttagatacaaagctctctgcatcttttttatttttaaatgaaatgacattataagccatcggtgtcgttattgttttatcatatacgtaagtagcgtcttctaacgaaatccaatctttcgaatcataatctcgaacaaatttctctttcgtcttttcacctgagttgatctccatccatttatacatacaaccgatatcatcaaactttaacgcttttccattttctaaaataatttctgttgcaaattgattatctgttaccccaatttgacaaatatcacatttatcatgtttctcatcaatggcaacagctgctgtttcctttttcccacacccgactaccgtaaatacgaaacataaacatatagcaagtacgacatattttactttcatcaatattcctccctagaaaccgtatactccacgaaaagaataccaaaaggttgtgtgagatttgtgaaaaaacaatgtgctttttgtaatataggaaacaaaaaaagatgtgtagttatttctacacatctctcatcactcacaacctgtaattaataaatcatcttctaatttaactaataatgtatcctcactaatttcctgtccaacttctacatttaccaatcttatatttccactaatcccgactgcaatttttttaagctcaccgtcattttttcggatcatcagtaatttctcccattcatatacgtaagaagattcattaataaaaatctcctctacttttccttcataagagctataaatctcttcaattctcgttttcatataacatctactccctatttcacacttcactattttcatcttattctaccattcttacgaggagcagcttactttttaaaaattcaaattaactaccatgaacaaaatgaacaaaataaaaattatgcttctaatgatgttatttttcaaattatttaccatttgaatagatgcttttattataaataaaaaacctttttctgaatttttattctattttgaaagcgcaatcattcttttgagggggaaattacatgttagcactacttggatttgcgatggtatttgtctttatgtttttaattatgacgaaacgtatgtcagcgctagtagcattaatattaattccgagtgtttttgcattaattggcggattctatgccaatatggggcctatgatgttagagggaattcaaaaattagcacctactggtattatgcttatgttcgctattttatattttgggattatgattgatagcggtttattcgatcctgtcattagtaagattttaaaatttgtaaaaggagatcctttaaaaatcgttgtcggaacagctatattgactattatcgtttctctagatggtgacggtacaacaacatacatgattacagtttccgcaatgtatccactatataagcgccttggaatgaaccccctcatattagctggagttgttatgttaggggcgggggtaacaaatcttacaccttggggtggacccacagctcgtgttatgagcgcacttggacttgaggcttctgaattatttacacctcttattccaggaatgattgctggtgcaatttgggttgttttcgttgcttactatcttggaaaaaaagaaagaaaacgtttaggaattatggatgtacagtatttaaaacaaatgcaaacaatggatgagcaagctgcaactgtcgaagccgcagtgcataaacgtcctaaacttctatggattaactttttattaaccgctacattacttgtctgtctcatactagaagttatgccgttacctgttttatttacagtcgcttttgctattgctgttatgattaactatccaaacttagaacaacagaaagaacgtattgcttctcatgcagggaatgtattagcagttgtttctctcgtatttgctgccggtattttcactggtattttatctggaacaaaaatggtagatgcaatggctaacagtgtagtaactcttataccagatgcacttggaccacaattgccaattattacagctcttctcagtatgccattcacatttttcatgtccaatgatgcattttactttggggtattacctattttaactaaggctgctgctacttacggaattagtgcagctgaaatgggacgtgcttccttacttgggcaacccgttcacttattaagtcctcttgtcgcttccacttatttattagttgggatggcaaaagttgattttggtgaacatcaacgttttactttattgtgggcagttggaacgacaatggtgatgttgattactggcattgtaattgggattattccaatataagacgcaaaaaacagtagaagaaataaatcctctactgttttttattatgaagaaacaagaaaataccgtctctccggtctccccacactcccatatattagctctgcgtggactttcttcccagatattaaatactctaaatagcgccttgcagttgatcggcttacgcctaccattgaacttagtacctctgctgtaatcccttcttcattaactgttaacatatgcttttttattttcgctaaagttaaaggatctatccctttcggggcatattccatttcatttcccttcacgcctctttgagaccataaatattcaatttgttccgtagataattgattgtttttctttaactgtataatctttttttgatagccttccagacttgctttaaatcggtcaaacattagtggctttacgatataatctgttactccgccccgcagggcgtgcctcactacatctgcttccgatgctgctgtaatcataataatatctgtatcgtgcaaatgattcctaatatatgtgacaagttccgttccttgcatatcaggtaagtacacatctaataaaacaagctgtggcttcacaagctctagccattctttcgcttgttctccagtcgttgccgttccaattactttaaatccctcaattttttcagtaaaacgacgatgaatgtccgcaatccgaatatcatcttctacaattaatacttcaatctcctcacccattactattcgcctctctctttcggtagtgcaataataaataacgcaccacctaaatcccctttttcgattgcaatacttccatttaaatcttctactaactctttcacttttgctaatccatatcctcgctctcctccttctttcgtcgaaaagcctttatagaatatgctagtaattatttcatcatgaatcccttgccctgaatcttccacttcaattaatatttcttctccaatatcagttacaaacatccttactttcttatcattctcttcatttttttcaattgcttcaaatgcattcgtaattaaatttcctaaaatagaaacgacataattactctcaatatgtggacttaatttgtctaaaccactttctctatctagcataaaatcaatcttcaactctcgtgctctattataaaatccaattaaaattccacctagccatggattttgaatccgcttcataataaattgaacaaaatcttgatataccgctgtttccttatgaataagctctaaagcatcttcgtatgattctaattggataagacctgaaagcgtatacaataaattgttatattcgtgcgcttgcgctcgtaatgcctctgtatattgcttcgtctgagataattctgctgttaactgatccatttcagatttcaaacgtaagctcgatacaacgccagttactttattctttactttaataggtagacggttcgcaataacagcctgtccttttatatttaattggcgatcaaactgttcttcaccagtttgaagtacatctagtatcgttgaattaggaattacatttaaaataaattccccaataatattttgttgtttatctagcgaaagaatatcataggctgcttgattgactaaactaatcatgccatttttatcgattacaataatcccttcacgtacagattgaatcactgtactatgctcttcatataaagatgaaatttcttctggttccataccgaacatcattctttttatacttgccgctaaatatatagagccgattactccaattaatagccctattattgtaatccaaaatacacgctttccatacacttctaccgctccatgaatatcatccattgaaaatccaacagacacaacaccaatgatttcattttcctgattacggattggaacttttccgcgtaatgaagggcctaatgatccagttgctttcgaaacatatgattttccttctaataaaacgcctttgttatctccaccaatcatcgcttctcctattttatctcgctcaggatgtgcatatcgaatcccctctttatttccaactacaatgaagtcagcctctgtatccattcgaattctttctgcaatcggctgaataatagaagctgggttttctttttgaaaagcttcctttatttcaggtatagcagcaactgttttcgcaacatgtaaagcccttttgccaatttgctcttctaccgtttcagataatatgtaataaaataaataactcgttagcataagtacaactaaaataagtatactaatagttaatgtaattctcggttggagttttaatttttttaacttcaaaaccattcccctaacatgattaaagatagaatttaaagaatatacagtctctttaattatacttaatcataacacggttactctatatttctttttctcttcataaaaaaagaaacgaagtaaaattactacctcgtttcttaacattcgttattacactttaaacttactaatcatctcttgtaattcttctgccatttgtgataaatggactgctgctgcatttatttcatctactgaagctaattgttcctcagaggaaccagcaatattttgaacgcttgctgcattttcttcaattgtagctgcaatttcattaatagatgcacttacttgttttgcatctaccgtcatttgttttgctacatctaccatgttatcaatttgtacaactgtatcatccgtagatttcaatatttcagcaaagctttgcttcgtttcatttgcaactacaagtcctgattgtacttctgctccaacttgattcatagagcttactgtttcttttatatcaaattgaatctctttcactagtttcccaatttccgtagaagactgtcctgattgttctgctagctttcgcacttcatctgctacaattgcaaatcctcttccttgctctccagctctcgcagcctcaattgccgcatttaacgctaataaatttgtctgttctgcaatatgttgaatcacttcaaggattgctccaatttgtttcgacttatcgtctaacaaaccaatgattttgtctgactgtgaaacagactcatgaattaattgcatttgattcacagtttgttcaactaacttcccaccattttcagcttttttcttcgtatacatagaggctgtagatactaatgaagaactatctgcaacacgctgaattccttctgtaacttcttctaacaatgttgctccttcttcaacttctttcgtttgtatttctgcaccacttgatacttgctctatcgcctgtgtaatttgttccgttgcttcgcttgtctgcttcatactagctgttaattcttctgaagatgccgctacatgacttgctgaagtgtttatattggaaatgacactttgtaacgatgcagccatctcgttaaaactttctcctagctgcccaatttcatctttagaatgaactgtaattgactctgttaaatcgccttcactaatctttttcgatgagataacaagttgttttaacggactaataatagaagcaattatgaagtaaattaaaatcccaccaattactaatgaaataccaataacagttattgttttatagaaaatagggttagctgcttcgataatttcttttgaaggcataattcctgctattttccatccagtctgcttatttgttataaaggtaatattgcgatcatcaccatcaagtttgaatttaaaatcacctgtttcttgtttatacaattccttctccactttttcttctaccttgtcacctggcttcatcgtcggatgcgctattacatttttagattggtcaaagattgctacatatccttttttgccgatattgaccatttttgaagtatttacaatatcattaataattaaatcaataccgagaacaccacttttatcctcattttgttttgctattgtaataacaatattccctgttgtacttgacttatatggggctgtgataaccacttctccgctttttttcgctgcttctttataccaatctctttcggtaggattatacccatctggcatttgaatagacggtgattgaataaattgtcctgtactagatcccgtataaactgcttctatttctggatgtaatttattatattcttctaatttattttgcacattttggagctgatcagttccgtaacttactccattaaataactttgtaaaatatactgcgtctacctttttactgtctatctccttgttaataacattatttaaaatctttacgttatcttccgctgattgtaaaattgtttcattaaaatttgtctttgcttgttgataagacgtccaaccaattacaatacttggaagaattaaaatgataacaaatgacacaagtaactttgtttttaaactactactccttaatttcccttgaaacatatttctacccctccataccgttttaaatgtaattatctcacatttaatttatttatataaattacacgattaattgtattaactctttgtctctttttctattaaagagttaatacatacctttttcattctatataaattaaataattaaaacaatatataaaaatgtatattattcgaaatattataattcacagaagaacctccagtatttcacttactagaggttctttccaccttactattctttatctttttctacttcttttttctcatcttctactacagatacaacaggtttatcacttgataattgttgtaccgctccttttccagcaaatccttctaatagctcttttaagtcaattccagaagaagcttttaacgtttcttgcatcgttgccattaaatcagttgcataacccgcaacttttccggcgccgctatttttaccaccgccgcctgtatcaacaactgtaattttatcaatgttactaagcggacttgcaacttccttcgcataacttggaagcattttaagaaccatatccataattgccgcttggccatataactcaaatgcctctgcaattttttgcttcgcttctgcttctgctaaaccttttaatctaataacatctgcttccgccgtaccttgtgctttttgtacttccgctttcgcttgaccttgcgctttttcgatttccgccttcgctaaaccttctacacgtacttcttccgcacgagctctcgcttcagcttcaatcttatattgatccgcatctgcctttttaatttgttttactttttctgcttccgctgattgctcaacagcatagcgatctgcatctgcttttttcttaacttctgcatcatattgcttttcacgacgcgcaatctctttttcttctaactcgatttgcttttcacgctcaatgattttaacgcgcatttgctcttctgtaacaccttgttgtgctttcgcttgttgtaattcgtaagaaagatccgcatctgcacgggcttgctcttgttccctcttataggactgtacttttaattctttatgtttttcagcttcagcgatttgtgcatcacgttgatattctgcttcttttgcctctttttcagcacgtgctttttcaatacgtgcttctttttcacgctctgcgttcgcaattgttgcatcacgcttaacggtcgcaatttgcggctgaccaagcgcatctaagtatccgtttttatccattatttctttaattgtgaaagaaacaatgcgaagtcccatcttctttaaatctgtagaagctacttcatgtaccttttgagcaaattgctctctattactatacgcatcctctactgtcatagaagataagattgcacgtaagtgaccttctaaaacctcttttgcttctacttttaactcttccgtttcttttcctaaatattgctcagctgcagtagatacttcttcaattgtagaacctactttaataatagaaacaccatttactgtaactggaacaccttgcttcgtatacgtatcacgtgtaccaacttctaatttgtagtttaataggcttaaaggttctgctctttgcataattggaactacgaaagtaccgcccccgcggataatcttaatcttctttccatcatcagtggtaacaacattctttcctccaccaagccagttccctgtaacaattaacgcttcatctggaccaaccgtacgatacttcgtaatgaatactaaaatgagtagaattaaaattgccagtaaaactccaccgataattaatggaatcgtcatgtaaattcccccttataattttggtttttttaaagaataagcgatgttttgtacaagtaaaacaccatcttggactccctcgataataacctctgttccttgcgaaatatctttttttccaactgttttagctgggattgcattacttccaaattgggatgaaattaatacttcaccaaatccttctgtaggaattgtcgtaatgacttctcctttgcaaccgataaattcatccatacgttgtacggtattttgctctgcttctgcaatcggttttaaaattagtattttcatgatgaaaacaccgataaaagatatagcaaatgcagccccaaaaatagtaatactattaaaggaaaacaaatattctcctatataactaagcccacataacatggcgaagaaactaagtaataaagtaacaacggatacagctccgcccccaaaactaaatatcgattcaaatatatctccaaagaagatataaataacagtgagtatagtagcaataataaatccatataaataaattgtttcaagtggataaccaaacaagaccatttcttatccccctttcttaaacaatcccttttttgttatatgtatgccccacctctttcaaagattatagttcttaattttcagttatttaccttttaaagaaaagcctgtaagacaggcctctaaaaaagaacaggagaaacctattgtgacaggctcctcctagaaaataaccgatatattatatatctatataatatactattttccacaaaaagtaaagttaaacatacattggaaagacacttattttactgataatttgtacgttccatcaccattatcatatttatatacatacaagtaatacttgcctggttttgcattaaatttcgcttctatatgattcccattggcttgaccgtaagctgcataattttgcatatctgattcatggtgaagtacccatgtcatcccaattccatactcatttaaaacagaaatgtcgatatctttcgctgatgctacattaaatgtataaacatcagtgtggtccccgccaataagactgccttttatcgtactatttagcccgatacgatttgcttcttctagacgattatttggttctgattctgttaaacttccatctttaatcgtaacagttgtttcgcttctgctctctttgcctttatcatcttttactcttaatgatactttataagaaccttctctttcatatacatgtactggattcacttctgcacttgtgcttccatctccaaattcccataaataagaaacaatttttccatcttcatcgtttgagccatcacttttaaattgaattccctcttttacaagaccgctataagggccatttatattaaccgttggagctttattttctccatcatcttttgcgattccatggaagactacatcatattcaaattcatttgaactattcacacgataattgacgaagtatgctgtaacagttttgtagccactccattctttttgcgccaattgttctaaagattcatttactcttttactcattgctttccaatcttctgattcaccttttgtgacactacctgtatacgtaccttctaatgtaaatgtattaaagaattgagaattatgttttgtcatttttgtatctttcataggcaacgtatcactaatttcttttttcacttcagttaacgatttcggtgcatgttcagctaaataatcatctgctacttccggtacattatatttatcttgattatcaattaactgctgcatatactcttgatactctttatttaacttaggatctttacttagattttcatgatatgcatcataatttttcacgtcattcgcacgaatcaaatcttgaattttatcaaatgtttcaaactgatgcgtatataagtaagactgcaatgcgaacgagtaattatagaaatcccaagaaccgtatttagcaaatagtgtacgctctgctgtataacggcttgcaggatcagatgataatccgctaattatactctttcttggtacaacgttattcgtacgagtagatcctgcgaaaaactctgcatttccttcttggaaccaagttagcctttcattttgatacatatctcctcttccaaataaaccaggaacttcatatctcccttgcagataatgagtaaattcatgacggaataactcttctaaactataaatactttgctctggtgtacgctcatatgtaaagaatgtacctgtctcttcaatataaattccaccgttgtttgtttcatatccatacaattgtctatttaactgatattcatctggactattataaattacgatcgttaatacatcatccgcatttcctggctctaacgctttgtcatttccaattacacggtgatactgtgcctttacttccttcgcagcccaatatagtctcttaattttttcttctgatactttatctcctgttttgaacacaattgatccatcgtcgaatgtatacgtttttggtaagtattgctcttttccttctttacgtattttctctaaatctactgtattcccgctataatctttaccattataatttgttgtaatttgttctaccgcaacaaaatacggttcacttaagcgcgggtacatatgcattgcttgtgtaacaacctctaatcctttatttggattactatgaaacttccctaaacggctagcaaaataaatgccattattaacaagccatttattttctggcgttacttcatttagaagagcaatacgatttatttcattaataaacccatctacttttccataccacatcgtttcattcgcttctttacgagcttcagttaagtacgactgtatatcatagtcaataccttgcatgatatcgtatattgcttgtcccttcattcgatcatttacataagtagtataattatcattgtattgctttaaaatattcgatgcgtattgaaccgtttcaacatcgcttgaagcattactaattaatttaccgtatgcagatacgactgtatcttgttcaactgtaccaagcttaaagtttggattgtttgcgattgcttttaaagcaggtaaacatttatcctggaagcttctttcatttaagtcgcttaattcactattataaaatgcaagataaaaagctgaacgcagcacttcagtaaacgtttgaattccttttgaatcatctttcgtaaatgtactacctctatgagctaattcatctataatgacttgcatttttcctttatctttataaaaagcctttgcatcttcattaaactggaataagtctgtaatttggtgccacttaatactgcctaacgtttcaactaattctcgatcattcattttgtttaaatcagccattgaatagctttctttaacttgctttactgcagttttcttcgtaatagatgctggtcgctgtgaaaaatctcctacttttaaacgttcttgaaatgataaagtttcatcaacttttgaaatatgtccaacttcatctaccgacttttcaattccaaccggtttcgttttcaacacgttatacggtactttttcttccgctgctgcatgagtttgaagtgcgcctaacgataaagccattgtactaatgctaagcatcactttattgatctttgatttcttgttcatatccttgccccctattttaatattccattcaagaatttaacataaaatctggatgtaacaatataaaatgcaatatttcatattatttcttcctataatttgtacatatcgtgaacacattgctctttacctccctaaaacaaattgcatcctttcacattataaaaaggtaattttttgacaattaaaaacttaattgttatgattattataattgttaactttattaaataagggtgggattctatgataaaaaaagaaaacagtgtattttatatctccttcttgctaacaacattattcattatatggggaattaccccagcaagttggatacaaggctacgatttacaaagtgttacatcttctttaaactcatttatcctcaataaatttgggtggttttactctctacttatgactacaatgattattttggctgtttatttagcattttctaagtacggttctattcgtcttggtaaagatggagaaaagccaaaatataattatccatcttggctatccatgttgtttggggcaggaatgggaattggactcctcttttatggaatcgctgaaccgatttcacattttacagatccattaacaggaaaagcggggacagaggaaagtgccaaactcgctatgcaatattcatttttccactggggactctttccgtggtcactatacgcaatggtcgctttaacaattgcatatttcacattccgcaaacaaaaaggtagcactatcggggctacagttactccattatttaatcgatcgaaaaattctcgtatcggaaaaacagttgatattctagctgttttagccacagtatttggcattgtgccatctgttgggattggtgctcaacaaattgctggaggattaagctatttattcccttccattcataacactttacttactcagctcgtacttatagctatcttcgccgttttatatttaacgagtgcacaaactggcttagatcgtgggattaaatatttgagtaacttgaatttctctcttgcaggtattttactcatctctttcttacttttaggaccaactgtatttattatgaaatatttcacatctacactcggttcttatatcggcgctttacctagtatgggattaaatttaggagcatttaatgaaaaatcttcttcttggattgaaaactggactattttctattggggatggtggatttcttggtctccattcgtcggtacattcatcgctcgtatttctaaagggcgcacaataaaagaatttatttttggagttgtattagtcccgactcttatctgtacattttggtttgcagtatttggtggtaccgcaatccatatggaaatgttccaatcgcttggaatagctgatgaaattgcaaaaaatggtacagagattggattatttgctgttatttcacatctaccattctctacatttttaacgattatcgggttaattttagtagccacatttttcgttacttctgccgattcagcaacatttgttgtttcaatgcaaacgagtaacggaagtttatcaccgaaaaatagtttaaaacttatatggggattaacaatcgcgataattgccgctattttattacaagctggaggattaaatgcactacaaatcgcagctataattgctgcgctaccattttctattgtagtcgttcttatggttacttcactctttaaagagctacgaaaagaagatgttaatttgcaaacgaaagaagtgccgaaaaaaataaaaaaggttatgtaacgattggcgcctcaaatcacttctaaatccgtaataaaacccattcatatgaaatatcattttcatatgaatgggtttttcactctattatatagtgttgtaaacatgctttttcctcaaagcctactttcttgtacaatttcatcgcacgatcattattcgtattcaaacatagtactatctctctcatcccttggaaggagaaaatatactgaattgcaacttgtaataactgctctccgacaccttttccatttatatcccccttaaaaaagacattatcataagcctatttcaaaatgaaactgccatgataatgtcttctcaaaaacttatacaattattttacaatataataagataacacgttatttatttcttaaataatctctttctaaatacaaacatactcagtgctgaaagaactaatactacgcctgaaagtaactttgatgtattcgcttgtccacctgttgctcctaatgatttcttactttcttcctgtttattagcaactggtttattttctttcacaacttgatgattcatgttttgttcttggactacttcggatggatttactgcttcttttgaaccttcaatttcttttcctgtttctttcccctccgctttcgactcttcaactcctgttgttagctcgtccacttcttcttttggctcttcaacttcttttgcaggttctttcacttcttctttcgatccttcaacttcttttaccggttccttcacttcttctttcgatccttcaacttcttttatcggttctttcacttcttcttttgtttcttcaacttcttttaccggttccttcacttcttctttcgatccttcaacttcttttatcggttctttcacttcttcttttgtttcttcaacttcttttaccggttccttcacttcttctttcgatccttcaacttcttttatcggttctttcacttcttcttttgtttcttcaacttcttttaccggttccttcacttcttctttcgatccttcaacttcttttatcggttctttcacttcttcttttgcttcttcaacttcttttaccggttctttcacttcttcttttgtttcttcaacttcttttgttggttctttcacttcttcttttgcttcttcaacttcttttaccggttcttttacttcttctttttccactatattctgtataactgttccgttaaaccttatgctaatttcatcagaatctaaatcaaatttatacaccttttcacctggcgtattccattttattactccgttattaaacgtccctccctcacttgtcaattgaatattttcaatactttctccttctaaatcatatacaggaacttgaatttcttcgtttatttttgcatcatttaaaatgatattttgtcttccaacatcaattgtaaaccactgccctaattgtattaacgacctgacatcacgaatctcattcccagctagatttaagctaaataagtttagcatggaaccaataaccgttacatctttaatatgattgtccgcaagatttaaccactgtaaattttccaatgaagatagtggtgttatatcttcaatttgattatgagatacattcacattattcaattgtttcaagtttgagatgaactcaatatttttcaggcctactccttctaaagtgagtttttctaagttcgtcatgtactctaaacctgttatattttttatctcatttccattttctttaaatatctctaattttttaatctgtaataaatcttcttttgtaataggagcgtttaaattctctctacctaaattctctttattaatatgttgttgtaaagttttatcgagaattatattttccttttgttcattatcctcttttattgtttccttgatttcgtctaatctttcaacaacattttgaattactgttccattaaacttaatacgattctcttctggctttatatccaacgtaaattcatatattttttcaccagtagtcccccatttaacagaaccattattaactatcccatcttcactcttcaattgaatagtatcaagtggctctccttgtaaattatagataggtattttaacttccttatctttttctacattatctaaaaagattttttgtctttgaatatcgatatatatcctttttcctagctcttgaacaggtctaacatcacgaatttcatttgaacctagctttaaatcatataagtctgttaagtgactaagtggcgttatatctgaaatatagttttcttctaaattaagtgattgtacagtagataatcttgataaaggttcgatgttttctaattcatttttagcaagatctaactctactaattttttcattgatgtaatatgttcaatattcgtaagtccattgttacttaaagataagttttttacatttttcaattgctcaattccagcaaggttatcattactaatttgattatttgccacagtcaaagtccttaaagatttcactgtaaataatggtttaatatcttttatataattactatttaaatctagcattttaatcttcttcatttggcttaatgggcttaaatctgagattttattgtttctcaaagttaaaaactcaatatgctctaactcagccaaaggtccaatatcttcaagttcaccataggttatacttaatgattttaattgtctcaatcccgagataaattttatattttttaacttaacttcttccaaagttaagttttctaagttcgtcatatattctagaccgcttacgtcttgtattcctttatttttagcttcaacgactattaaagctttaacttttaataaatcttccttagttattggggtatctagattttctctattcaaattatatttattaatatgcctttgtagttgcttatctactattacatttccaattccatcttgttgatccactttatcctctttattttccttttgtttttctggaacattgttctctaaattcaatgtatttacttcaaactgtacttggtacttattatcataggccattgttggaatataaatatgcattcgcatattatacctttttcctaattcccctacttcaaaccgaatcactttcgttccatttttctttttatcttctgatattactttcacatcatgaaacacacctggagtatgaatatcctctgttttcaagtattgaaagaaatcactatcacttaatgttgctgttacaattttctttccattctcaattgttaatttcggatcctttatataaacagctgccatagactcttcattcgttttatctttatacgctttaataacagcatcatatgtaccatcttctaaaccttgtccagttttattcgcctcaattgctactgccgctaaagcaggtgttgaataaacagcaaacggaagtgataacgctgccgctataatcattgcatttatacgttttcttttattttgtttcaactttacatctcctccgaaatatataattcgaaatgtaatcatttctcgaataaacgataatgattttcattatcattgtcaactaggaaaataaaaagtttacaaaaaaagaacctctttaaaagaggttatgccattttctcacctgattcttctctaaaaaagcttttcatcgcatgaaatacgtctgctttttgctttaaaatatagtatctaaagttttcatctttaatatttttataggctgacatgagtgtactatggcggttgtactgattcacttccccatacccaaacatattacacttcttcattagctcttcaacaagttttacacatctagcattatctgatgttaaattatcaccatctgaaaaatggaatggataaatattatagcggtctggtgaatatttattatcgataagttcgagtgcttttttgtatacagaagaacaaatcgttccgccactttctccttttgagaaaaactcttcctctggaactacttttgcctccgtatgatgggcaataaattcaatatctactgtttcatactttgtgcgtaaaaatcttgtcatccagaaaaagaagctacgtgccatatatttctcccatattcccatcgatccactcgtatccatcatcgctaatacaacagcttttgaatctggctttaatacttcattccaagtgcggaactttaagtcttcttggtgaattggatgaaaagatgctttaccactcattgcatttcgtttatatgcggatatcattgttcttttcttatcgatatttccccataatcctgtttttctaatgtcattaaattcaacatgttcaatccggttttcatccatttcttttctctttaaattaggcagttctaactctctgaaaaacgcttgctctaattctaaaatagagacttcagcttcatagtaatcttccccagctgcatctcctgctccttgcccttttcctggccctttttgtttttgaccacctgatccatctctcgcaacgacatcaccaactttgctgtcaccgtttccttgcccaacatgtttatttttatcataattgtatctaatcttatattcatctagagaacgaattggtatttttacaacatccttgccattagacataactatactttcttctgttacaagatcgggtaaattattcttaattgcctcttgtactttttcttgatggcgctgttggtcgtcatatcctttgcgatggagggaccagttttcctgtgaaatcgtataatttggttgattttcttcgcccattcctttccctccttactgtaattgtcttcctgtatgaacagcaatctataaattttgttctgtaatgtgcaagctagaatgtttgaaaggtaactgcccacagaaaatcatcccataaacatttataacgtttttcatacaataccccgagcatcctaaacaaaattttgccactcacataatagaaagaaatattcagccactgataagaaagaaacacaatgcattgttgcacatatttttactttgcaacatattgtattgtgttggcttttttcgtatgaatggttggttactctatcatatgcatattgtaaaaataattgacaataaattcataaaattgcatcttaatttattacatttggacaaggtatgacactttatacacatatgaacggataataaaacgctgtcccgcaaaatacaagagacagcgttttgttatcaaactatctgtttaacaagctacctacatagcgtagtaattcatttgctgaagaagaattatagccatgctcatcaattaaacgcgcaacaacatcattgattttcttaagctgattttcgtccggcgttttcgttgacgttgtaattttcactatatcttttaaatcagcaaatagttttttctgaatcgcttcacgaagacgttcatgtgaattataatcaaagcgttttcctttacgggcataagcagaaatgcgaattaaaatctcttcacggaacgctttcttagcattttctgaaattccaatttgctcttcaattgagcgcattaatttttcatctggactcatttcttctcctgttaacggatcacgtaatttcgatttattgcagtacgcctcaacgttatctaagtaattatccataagcgtcttagctgattcttcatatgaataaacaaacgctttttgtacttctttcttcgcgatttcatcgtattcttttctcgctaatgagatgaagttcatgtaacgttcacggtcttcattactaatggatggatgctgatctagcccatcttttaaagatctaagtacatctaacgcgttaatagatggtacctcttttcgaatgattgtagacgaaattcggttaatgacataacgaggatcaatacccttcataccttcatcttgatattcgcgttgtaattcttctacatcaatcgcattataaccttctaccgtttccccatcatacaaacgcatctttttaattaaatcaatatccggacgcttcggatcttttaaacgagttaaaatggtgaacattgctgcaacgcgaagtgtgtgtggtgcaatgtgaacattcgatacatcactttcacgaatcattttttcataaatatgttcttcttcacttactcgtaaattataaggaactggcattacaataattcttgagtgcaatgcttcatttttcttatttgctataaatgagcgatactctgtttcattcgtatgcgctacaattaattcatctgctgaaataagcgcaaatcttcccgctttgaaattcccttcttgcgtaagtgataataagtgccataaaaacttctcatcgcattttaacatctcttggaactccatcattcctcggtttgccttatttaattctccatcaaatcgatacgcacgcggatctgattctgaaccatattctgcaatcgtagaaaagtccagactacctgttaaatctgcaatatcctgtgattttggatcagacgggctaaatgtaccaatccctgtacgacgatcttcagagaagaagatacgctctacaactacatcctcaattcttgatccgtattcttgctctaaacgcatgacatttagtggtgataaattcccttcaattctaaccccatactcatcaaagaaatcatctcgtaaatgatgtggaattaaatgcagtggatcctcgtgcattgggcatcctttaatcgcaaaaattgctccgcgatctgttcttgaatatgtttctaatcctcgtttcaacattgtaactaacgttgatttccctccactaacaggacccattaataataaaattctttttctaacatctaatcgttttgcagatggatgaaaatattcctctacaagacgttctagagcatcctctaatccaaagagctgattactaaagaagttatactttcttctaccatcaacttcttcaattccagcatcttttatcatattgtaaatgcgagagtgtgctgtttgagccacccatggtctttctttcacaagctccaaatactctgcaaacgtaccttcccattgtaaacgttcttctgctgctcgatgctgttcaatcttttttagaatatccattatagctcctcccccatctccttgttcaatcggattattataaaaggtatgctaggatgtccttaaacattctttaaatcaaaacgaaatatataatagcacactaaaattctctccaaaattcaaagaaaattctgtataatataggtattaacgtttttacactgctattcattataaataaattcttttcttctaagaaccttacatacattttgggtaataaataaaactcatgaaccgaaaaaagtaaggaggatattagtatgaaattattattaattttaggtgtatcactcacatttcttacagctatttttacatccggttacaatgacaaaccaggtacacataaaaaatgatgtgcttttagcacatcattttttttatttataatacatattttccatatcatatttggatagtggtcggctataataataaccttgtacaagcttcacattcttttctttcaaaaactgtatttgctcctttttttctactccttctgcaattacatttaattctaaagtatgagctaaatgaataattgcagctgtaatattcgtatcacgttcatctatatgtataccttccataaaagaacgatcaatttttaaagtatcaattggatatgtttttaaataacttaaagatgaatagcctgttccaaaatcatctaaatgaatctttaaattttgctcttttaattgtagtaacactctcttcgatatatctttatgtataagagctccttctgtaacctctatcgctaataaatgagttggtacattgtacttatttaaagcccgtgtaatcatctctattaatgtaatagaacgaaagtgtctagctgaaatattaactgcaattgggaccacatcataccctttatttaaccattcgcgcaattgctgacacacttgatttactacccattcatccagcttaataataaatcctgttctttctgccaacggaataaattggtttggagaaacaaatcctaattccttattctcccaccttattaaagcttccatactagctatttttttcgtttcaatattaatttgtggctgataatataagaaaaattcatttttttctatagcacgatgtaactggttttctattataaacctttgttcacgctcacagtctaatccactacaataaaaatgataatgtccttttcctttttcttttgctttttctaaagcagcatcgactctctgaaatagtattttttcatcttctccatctgttggagccattacaattccaattgacgcgcttaaatatacatcttcttcttcgattacaaaatattcactaatgttttttaatatgctttttgcaacttcctctacatattctttcgttatattttctatcaacataacaaattgatcatcgtgttctctaaataagtgcatatcttctatttttagattacttaaacattctgtaactttttgtaatactttatctccctctttatgaccaaatgtatcattaatacgatgaaactcatctaaatctataaatacaagtgcaaaatttacactctcatttaaaaaagtatttaacttatttgtacatgaaattctattcattaatcccgttaactggtcatagtaagctaaatattctgttcgcatttcgtttaatacttgccttgtaacatctctcgtaacaatataaatcccaacaatttcaccgttcacaataatcgggatagttctcaaagaaatatatagctcgtacccttctttatgaacatatttctttgaaacaatttgttttgcttttccttgcatcgatcccttaaatataatttgaaaatctttttcatattctttattaatgaattcaaaaataaatttattatttaattcctcataccggtatccaaatatttcatacgttgccggatttgcatatgtaactctccctatagaatctatagatataattgagtcattattatattccagtaacgacttaaataacatttgtttttcctctatctctgtcttctcctcaatttgagctgtaatatctcttgtaatacaaataacaaattgacatattccttcttcgtcgcagacaggattaagtgaagattcatagtgtatctcaccttttggtaaattgactacatcacaaaaggtgtgtgctttcgcttctctcactacttttgcatattgcctttgcaatatccccgctatatcttttggtaatacttctgcaaaggtttttccatagcactcttcgcttaacctagcataatccattcctattttattcacatacatatattgaaacgtttcattatcaataactttcaatatgaatactaaatcttgaatagcatgtaataatccttgtctaattaaatccatatctatcatacttaaaaaggtattttgattactatattcttccttcatatttatctcaacccgtcttatctatttttaatcatatatcccattctatatgattatgtcctctcttttaaatgtatgattatatattatttttattttataaaaaaaagtcgccatatggcgacttttaataaacgatttctaaatctaatccagggtaattttgttgacggaacgcttcataaattaaaattgctgctgtattagataaatttaatgaacgtactttatctgtcattggaatacgtaaacaatgatcaaagttttcttcgattacattagctggtaagccgtttgtttctcttccaaatacaaaatagtaatccttctcgcgcttgctatagtcaaacgctgtatgagctttctcgccatactttgttaaatagaagaattcaccgtctttatttttttcataaaattcttcaattgaatcataatacgtaattttcacgtgctgccaataatctaatcctgcacgctttaacattttatcatccgttgaaaatccaagcggtctaatcaaatgtaattctgttccagttgctgcacaagtacgagcaatattccctgtatttgctggaatttctggctgatataaaacaacatgtactcccacgcgatattcacctctgttttttgtctactacgtattataccacttgagcgaaaaatctctacccattaataatatgaaagaatttatatttcatttgtggtgtatatttactagagtcttcatagttccaataacgtcgacggctattcgctgaatgtgcatttacaagcggcataccatctgcatcttttgctactacaatcgtcgtatgattccatcttccgtcatcctcgaaatcataagcaatgacatctccaagaataagttcttctggcctctctaccgcctctgctcgaagtcctgttgtagcacctgacaaataccaataaaaagaatgtgcaacagcccagctccagctccactgattctccctttgccaccatcctttacgaatattaggatatccgctcataggtacttctccagtatgaagacattgagaaatgaaattcgtacaattatcagggaaattacgatacataggatttcggtcatcccaccaacgctctgcatatttcactgcctctaaacgattatactgataagaaccgtacttctctttcgtaatttccctttctaatgtctcacccattctaatttcttctgacacttcaatagcataatcgcctataattcgactattatttaaacaaactcttcgttttaattgttcctcttcaatataaaataattctttatgcttaattaaatatttaaaatgtatttgataatcaatttcttgatggtcattactatttaattgtctaatgaaagaaacatccgcagttgctttcactatatgtgcactacgtctttgaaacaattgtttctttctcagtgccatttgtagtaaatcctcagcaataccatccacattcgttcttttctccgttatatatgctaaaaattgttgtacttggttttcaatcttcgtttttacaaccattctgtctccctcccatattacaatatgaaaaagggaaatattatctactcttttttctgtgctaacaattcaagcccgcgattcatttcatgaagcacttcttcatctttctcacgttccatcgctttctcaatcgcttcgcctactccatctccgccaattttcccaagtgcccatgctgccgttccgcgtagtactggtcttgggtcatctttcataacaccaattaaatcaggaattgccgatgtttctttaaaatgtgctaatgctaaaatcgcatttctttgcagtggctttttccctctccatgatcctgacataatcccatatttctctttaaaatcacgattactaattgttaaaagtggtgttaataatggtttaactagctcaggatccggctccatctcaggatgattatgaaaatccattcctttgtttttcgggcaaacagtctgacacgtatcacatccatatatacgatttcctattttatcgcgatattcttcaggtaggaatcctttcgtctgtgttaaaaacgcaatgcacttcttcgaatctaactgtcccccctgtattaaagcaccggtaggacaaatatcgatacatttcgtacagcccccgcattgatcttctatcggcttatctggcgggaatggaacatttgtaatcatttcccctaagtatacgtacgaaccaaattcaggtgtaataatagagcagtttttaccgctccatccaatgcctgcacgctctgatacagctcgatcacttaattcacctgtatcaaccatggacttcacttctatatccggaagtttttcaattaaatatgcttctaatttttgcaaacgatctcgtaaaacaagatgataatcttgtccccaagaagcacgacaaaaaatcccacggcgttctccacgcttacttaatggtgcattttttaattttgaaggatatgctaaagcaatcgcaataattgatttagcacccggtaataacagttgcggattcgttctcttctctatatcaggctcttcaaatccagattgataatttaattgttgttgctggattaagcgctgctttaattcctcaaaaggagaagcactcgcaaagcctattttatctatgccaattgttttactatacgcaattacatcttgctttaattgttcaaaatccattcctaatcgcctcctcagatgaatccatcccttatgtaacgaccctattggttagtaattcacttttggaatactattatttacttctattttcgcatgtaattaggtttttcaaacattaaaaaacgcaatgcctcgtttatctcggaaacgaaacactgcgttgatcacaatttatagaaaaacatttaataaaatttggagcgggtgaagagaatcgaactctcgaccagagcttggaaggctcttgttttaccactaaactacacccgcaaatatgaattacatataagatattagaataacttatgtaaagtagtatagcatgtaaaaaaagtagaggcaagaattttatcgaaaaaagtcgaaaaagtgatgagagacctcatcactttttcaattctttatcaattgccttcttcatactatcgaaatcagggtttgcaagatttccgtttacatatacagaaggagcaccttgaacttttaatttttgagcacgatctgaatctttacgtactttttctttaatgtctttactgtgtaaatctttcttaaattgctctacatcaacttttggaagtttctctttcacaatgctaagaagcaaatcttctgtaatccattcttccgtatctttcttttgattttgataaatctcatcatagaaaatccagaatgaatctttatcttgtttataaattgcttcaccagctgctgcacctaaatccgagtcttttccgataaatgggaagttaataaaatataactgcactttgcctttatcaatatactcttcttttaatcgaggtaataccgttacatcccaagtacgacaagcaggacatttaaagtctccaaattcaactaccttaactggagcatcatctttccctaaagattgttgcgtagaataagcaaacatctcattccctttatcttttttgtcatttatgatgctatacgcaattgttccaattacaatcaatactgcgatagaaaaaactataccaagagccatgagtttatttgatttcatatacattcctctttaaattcatattctgtatacagcattgtacacaatacacataatatcaacacttatatacgtcacgcaatgaacacgctcacataaattacaaaaacacaataattgtgacgatattgtgtcacaatttgtcacaatttattcaaaaaaaagaagctcctctgtaggaacttctcttaacttactgcttttttacgcgcgctatttaacatcgactgctctatttttatatcatgacgaattactaatttctcactaactgcttgaacatactcatcatggcttatatagccttctttctccattagtctcaaaacgacatttcgtctctctactgctttatcatagttttgggcaggtgagtaataagcaggtgcttttactacagcagccatcattgcactttcagccaacgttaattggttcacctttttaccgaagtaaaggtttgctgctttttcaattccccatgctccttctccataataaatattacttacatataattttaaaatttcatccttcgtaaatgtgcgttcaatttttttcgtataaaaaatctctttccacttacgagaaaatgtacgttcatttgttaaaaaggcatttttagatagctgttgtgtaatcgtacttcctccttgcacgacaccaccagcctttatattctcaactgaggccctaataattgctatataatctaaaccgttatgatgataaaatcttttatcttctgtcgcaataaatgcatgtgttaatgattctggcacctctaacttagccggtacatgtaatttactaatatcacttttctcaatcattacatttccaacgaataataacgtacaacttaacaataataataatataatggctttataaaaaagtttagtcattggatttaatgcaactttttgatgatagttcaccctagataatactcgttctttcatcttgaacacctcttttccacacagcatataactcttactttaagaatacattgttgtaaaaaaatatcccatcgatttctcttacacgtaccttacatcattgtaaggtataaagtgaaactttaatgagccctcatcaatcaagcttactgcccagcaaatagtgggataaaaaagtattgtatcacagtatttttttatctactattcatctgaaatattgaatataggttatgttaaagcacgaataaccaataaaagagaaacccttaagactattatattttcactttacactttaattatatcatctacaaatatatatacttttgactatctagtaatctaaatgtatataacatatagatttattatacagaacaaatgttctgcaaatcaatactagtgctattattattttgacctttttcttaaacagtatacaaaaaagagtagtgattcgaatgtatctcaaatcggctactcttttctttacaatcttcctattaaattatacggctgtacttcccacgtttcatacggaataaaatgtgttgctctcattgcatcaagcgttctggatttcatatgaggacgcgttatatactcatctatgttctcttcatttaaatcaacaaatttacccacttgtatctcttcgggttgagtttttatttcaccacttatatatgctactttaaaaacaacagctagaatatgcatagaggtattataataaacccctgtaattccgataggcttcaccgttaaccctgtttcctcttttatttccctacagacagcttgatcgagcgcttcgccttcttctacctgtcctcctggcaactcccacgtatcagctcgccagtgcacttttgttaataacacttcatttttttcatttgttaaataacctgctacagcaactatatgctttggtgtcttatgttccatattaagcctcctagagataatgaatattttgtatatccctataatcatattcactacctacaacaaaatacctttaatacttcatcaccttaattaacttcataaaaaagaccctatccgctaagcgaaaagggtcatctatcgtattactctcctaagtctacgttgtgataaacttgttgaacatcttccaaatcttctaatgcatcaaccattttctcaaattgtgcttgagcatcttcaggaagtgttacatcactttgtgcaagcattgttaattctgcaactgtaaactcctcaacgccagcacctttaagtgcagattgtactgcatggaattgatctggttcagcatacacgataacagaatcttcttcttctagaatgtcacgtgcatctacatctgcttccattaaaatttcaagaacttcatctgatgttttaccttcaaggccgataacagctgtcgcatcaaacatgtaagctacagaaccgttcacacccatattaccactgtttttgctaaatgcagctcgtacatctgctgcagtacggtttacgttatttgtaagtgtatctacaataaccatagctccatttggtccgaatccttcataacgaagctcgtcataattttcttctgaaccgccttttgctttttcaactgcacgatcaataattgttcttggaacattgtatgttttcgcacgctctaatacaactcttagcgcttggtttgattctggatctggctcgccttgttttgctgccacataaatttcacgcccaaatttcgcgtatatacggcttgtatttgcatcttttgatgcttttttgtctttaatattgttccatttacggcccatactttccactctctttcccgttttaaatctacataaaaatattaatatgaaatataatgtgtgttcaacacatttttaaaagaaatataaaaagttcatttttgattcatattatagacataatataaatcactatcattttgttctttcgacaagttatattatacatgaattcctacgtttattacgaattttagaagcacatagtataatttaacaaaaagactctaacatttctgttagagtctttttatattgctgacacctattcccataattactttctattgttgtataataaaaatagggaaaaatttgaagaaaagagagaaggagaattatgacacattcaaatgagaaaaaagcacatagtcttaaagggatagaagaaaagttaaacccaactatctatcaagtgagattcatgaaattagatgaaccaattcaatttgagtcgttccctgaattaaaagatttaggggactggttaagtacttcaacgcatatgtgggcgtgccactcaactatgtataagtacaacagagaagggtttgaaaagaagtttttagagattacaaacttaaccgttgatagtgtactaatatctactggtggtatcggatttaacttcatgtcaccggggtggagaaattctctctagagtactcgaaagaaatattgtatatacaatactttttctgcttattttgtcatgtaatgaaaagaaaacaaaaaagctctatactaattgtatagagcttttttacgccgttcatgataccgatggtcggggtcgaaccgacactcccgaaggaacacgattttgagtcgtgcgcgtctgccaattccgccacatcggcacaaaagaaaaggcggcaaccggatttgaaccggtgataaaggttttgcagacctctgccttaccacttggctatgccgccatattaaattttattggagcggaagacgggattcgaacccgcgaccccaaccttggcaaggttgtatgtgacatgtggagctgacgaatactaatagatcgaggacttaaccatataatatgtagcaatgttatctagttttgaaggaatatgccttcatagtttggtgatgatggcagagaggtcacacccgttcccataccgaacacggaagttaagctctctagcgccgatggtagttgggaccttgtccctgtgagagtaggacgtcgccaagcaaaaacctaagtcgtttcgacttaggtttttttgtgtttatttttatttaccgaaggctataatccataaatttaataaagctaaagacgaaaaaagaatgaaatagagactgtttaaaataatagcaatgattttttgtgttcctgattttcctaatgccactaaagtaatacttaaaataggacaaattattactatcataagtatatattttaaataatgagatgctataaataagtatttaataattacagaaattactgcaatagagaaaaataaataggataatagcatagttctttctttaacagttatcctctttagaaattaaatcgttataataatacaagagtgtatatattttgatttaaaacatactgaagtgccatttaaacgattatacgtaaaatagatctctagaaatatatattctaattcccttttcttcttgcatatagttgcaattcttcttttgaatataactaaaacacgaacgttattgactactaataaaaaaacattcgattatttattgacattgtttatgaaatattgttaatataaccatagaaacaataatataagacctcatataatcgcggggatatggcctgcaagtctctacctaacgaccgttattcgttagactatgagggaaagtcactcggtatttttctattcacaagggatacgtatgcctgagtagagcgctttctctcatagtaaaagagaaactgttctatttcaggctttttttatttgaatcggggggattctaatatgaaatcactagttggagtcataatgggaagcacgtcagactgggaaacaatgaaatatgcttgtgacattttagatgaattaaatataccgtatgagaaaaaagttgtatccgctcatcggactccggattatatgtttgaatatgcagagacggctcgtgaacgtggattgaaagttattattgctggagctggtggagcagcacatttaccaggaatggttgcagcgaagacaaatcttcctgtaattggagttccagttcaatcaaaagcattaaaaggcttagattcattattatccatcgtccaaatgccaggaggtgttccagttgcaactgttgcaattggtaaagccggttcaacgaatgctggattacttgccgcacaaatacttggatcattccatgatgatatacatgatgcattagaattgagacgagaagcgattgaaaaagatgtgcgtgaaggtagtgagctagtatgacgaggatcattttacctggaaaaacaatcggtattattggaggcggccagctaggaagaatgatggcattggcagctaaggaaatgggatataaaattgctgttttagatcctacaaagcattcaccatgtgcacaagttgctgatattgaaattgttgcaccatatgatgatttaaaagcaattcagcatttagcagagataagtgatgttgtcacatatgaatttgagaatattgattatagatgtttacaatggcttgaaaaacatgcgtacttaccacaaggtagtcagttgttaaatacaacgcaaaatcgttttacagaaaagaatgcgattgagaaggctgggttaccagtagcaacgtatagattagttcaaaatcaagatcagcttacagaagcaattgctgagttatcattcccttccgtcttaaaaacgacgacaggtggatatgatgggaaaggacaagttgttttaagaagtgaagctgatgttgagacagcaagaaatcttgtggataaagcagaatgtattttagagaaatgggtgccttttgaaaaagaagtatcagttattgtgattcgtagtgtaagtggtgaaacaaaagtgtttccagtagcagaaaatattcatgtaaataacattttacatgaatctatcgttccagctcgcattacagaagagctttctcaaaaagcaattgcttatgcaaaagtacttgcggatgaattagaacttgtgggaacactagctgtagagatgtttgctacagataatggtgagatttatattaatgaattagcgccaagacctcacaattcaggacactatacacaggatgcatgtgagacgagtcaatttggtcaacatattcgagcaatctgtaatttacctctaggagaaacaaatttgttaaaaccagttgtcatggtaaacattttaggcgaacatatagaaggggtcctaagacaagtgaatagattaaccgggtgctatttacacttgtatggaaaagaagaagcaaaagcacagcgaaaaatggggcatgttaatattttaaatgataatattgaagtcgctctagaaaaagcgaagagtttgcatatttgggaccatcaagaacaactgttggagggaaaaagatgattagtcgttatacacgcccagaaatgggtgcaatttggacggaagagaacaaatttaaagcatggttagaagttgagattttagcttgtgaagcatgggctgagcttggcgatattccaaaagaagatgttaagaaaattcgtgagcatgcatcatttgatattgatcgtatttatgaaattgaaaaagaaacacgtcatgacgtagttgcattcactcgtgctgtatcagaaacgccagcattaggtgaggaacgtaaatgggttcattacggtttaacatctacagacgtagtggatacagcattatcttacatcttaaaacaagcgaatgaaattatattaaaagacttagagaactttgtaagcattttagctaacaaagcgaaagagcataaatacacaatcatgatgggaagaacacatggtgttcatgcagaaccaacaacatttggtttaaaacttggtctttggtatgaagaaatgaaacgtaacgtagagcgtttcaaacaagctgctgatacagttcgtgttggtaaactatctggtgcggttggtacatatgcaaatatcgatccattcgtagaaaaatatgtttgtgaaaacttaggattagaagcagcaccaatttcaacacaaacattgcaacgtgatcgtcacgcacactacatgtcaacacttgcactaattgcaacatctatcgaaaagatggcagttgagattcgtggtttacaaaagagtgaaacacgtgaagttgaagaagctttcgcaaaaggtcaaaaaggttcttctgcaatgccacataaacgtaatccaattggttctgaaaatatgactggtttagctcgtgttatccgcggttatatgatgacggcttacgaaaatgttccattatggcatgagcgtgacatttctcactcttcggcagaacgcgtaattttaccagatgctacaatcgcgttaaattacatgttaaatcgctttggtaatatcgttaaaaacttaactgtatacccagagaatatgaaacgcaatatgacaagaacatacggcttaatttattctcagcgcgtaatgcttacactaatcgacaaaggtatggtacgtgaagaagcttatgatatcgtacagcctaaagcgatggaagcttgggaaacacaagtacaatttaaagagcttgtagaagctgatgagcgtattacaagcaagttaacacaagaagaaattaatgaatgcttcaactatgagcatcatatgcaacacgttgatacaatctttgaacgccttggattaaacgaagcgtaaaatttcatatggcacagaatagagtcattctgtgccattctttataaaaacattattcacatttttcaaactacagggggcttgcgaaatgcaaaagctagaattgctgtatgaaggtaaggcaaaaagaatttatcgtacagaatcagcagatatggtttgggtagagtacaaagatagtgcgactgctttcaatggggagaaaaaagagacgattacagggaaaggtcgtttgaacaatgaaattacaactttattgttcagaaagttacaagaagtgggaattaaaacacattttgttgagaagttatctgaaacagaacaacttgttaaaaaagtgagtattattcctttagaagttgtcacaagaaatgtaattgcaggaagtctttcaaaacgattaggaatggaagagggaactgtacttgcagaaccaatcgtagaattttacttcaaagatgatgatttaggagatccgcttgtaacggaagatcatattcgtgtattaaacgttgcatcaccagagcaagtaagcgtattacgagatatggctctacaaatcaatcaagtgttgattgatcatttcgcaagctgtcgtgtaagattagtagatttcaaattagagtttggtgtaacggaagaaggagaaatcattttagcggatgaaatttcaccagatacttgccgtttatgggatgaaacgagcaatgaaaagtttgataaagacgtattccgtcgcgatcttggaaatttaacagatgcttatgaagagattttaaaacgtttagggggaatttcacatgtataaagttaaggtatatgtaacattaagagaaagcgtattagatccacaaggaacagcagtaaaaggagcacttcatagtctttcattcacagaagtacaagatgttcgaatcggaaagtacatggaactaacaattgataaatctgtatctgatttagatagcaaggtaaaggaaatgtgtgaaaaactattagcgaacgttgtaatggaagacttccgttatgaagttgaggaggttgtcgcacagtgaaatttgccgtaatagtatttccgggttcgaactgtgatgtcgatatgttccatgcaattaaagatgagcttggcgaagaagtagattacgtttggcacgatacagagaatttagatgaatatgatgcaattctactaccaggtggattttcttatggtgactacttacgctgcggtgctatctctcgctttgctaatgcaatgaaagcagtgcaaaaagctgctgagcaaggaaagccgattttaggtgtatgtaatggattccagattcttgttgaatcaggattactaccaggagcgttaatgagaaacgaaaacttaaaatttatgtgtcgcactgttcagttgcgtgttgaaaataatgaaacgatgtttacatcacaatatggaaaagatgaagtaattaatattccaatcgcgcatggtgaggggaattactattgtgatgaagcgacgcttaaacaattaaaagagaacaatcaaatcgcattccgttacgtagaaaaccctaacggtagcgtttcagatattgctggtattgtaaatgaaaaaggaaatgtacttggtatgatgccacacccagagcgtgctgtagatgaattacttggtggtgctgaagggttaaaagtctttcaatctatcttaaaacagtggagggaaacatatgtcgttaatgcttgaaccaaatccaacacaaattaaagaagagcgtatatatgcggaaatggggctaacagacgaagagtttgccatggttgaaaagattttaggtcgtctgccaaattatacagaaacagggttattctctgtaatgtggtctgaacattgtagttataaaaattcgaaaccagttcttcgtaagtttccaacgacaggtgagcgcgttctgcaaggacctggagaaggtgctggaattgtagatatcggtgataatcaagcagttgtatttaaaatggaaagtcataaccatccttcagctattgaaccatatcaaggagctgcaacaggtgttggtggtatcattcgtgacgtattctctatgggagcacgtccggtagctctattaaactcacttcgtttcggtgaattacagtcaccacgtgtgaaatatttattcgaagaagtagtagcaggaattgcaggatacggtaactgtatcggtattccgactgttggcggcgaagtacaatttgatccatgttatgaaggaaatccacttgtaaatgcaatgtgcgtaggtttgattaaccacgaagacattaaaaaagggcaagcgcacggtgctggtaacacagtaatgtacgtaggagcatcaactggtcgtgacggtattcacggtgcaacattcgcgtcggaagaactatctgaaagctcagaagcgaaacgtccagcggttcaagtaggggatccatttatggaaaagcttcttattgaagcgtgtttagaattaattcaatccgatgcacttgttggaattcaagatatgggtgcggctggtttaacatcatcatctgcagaaatggcaagtaaagcaggaatgggtattgaaatgtacttagatgatgtaccacagcgtgaaacaggaatgacaccatatgaaatgatgctatctgaatcacaagagcgtatgttaattgtcgtgaaaaaaggtagagaacaagaaatagtagatttatttgagaagtatggtcttgcagcggttacgatggggaaagtaacagaagataaaatgcttcgtttattccataaaggtgaaaaggtagctgaagttccagcagatgctttagcagaagaagcaccaatttatcataagccatcaaaagaagcagcatactttgctgaattccaagcaatgaaaatggaaacgccaaaagtagaaaattataaagaaacgttattcgctttattacagcaaccaacaattgcaagtaaagagtgggtatacgatcaatacgattaccaagttcgcacaagcacagttgttacgccaggttcagatgctgcagttgtacgtgtacgcggtacagaaaaaggattagcaatgacgacagattgtaactctcgctacatttatctagacccagagatgggcggtaaaattgcagtagcagaggcagcgcgtaatatcgtatgttctggcggagagccacttgcaattacagattgcttaaacttcggtaacccagaaaaaccagaaatcttctggcagattgagaaatcagtagacggtatgagtgaagcttgtcgcacattacaaacaccagttatcggcggaaacgtatcgatgtataacgagcgtagtggtgaagctgtatatccaacaccaactgttgggatggtcggacttgtgcatgacttaaaacatgtaacaacacaagagtttaagcaagctggtgatttagtgtatgtaattggtgagacgaaagctgagtttggcggaagtgaattacagaaaatgattcacggcaaaattttcggtcaatcaccaagtatcgatttagatgtagaattaaaacgccaaaaacaagtattagaagcaattcaagctggtcttgttcaatctgcacatgatgttgctgaaggtggtttagcagttgcgatttcagaaagtgcaattggtgctaaaggcttaggtgctactgtgaaattagatggagaagcaacagcagcattattcgctgaatcacagtctcgcttcgtgataactgtaaaacgtgaaaataaagaggcgtttgagaaagcagtagaagcaatccaagttggagaagtaacaagtacaaatgaagtaacaattcataatgaagaaaatgaagtattacttacagcaaatgtagatgaaatgagaaaggcttggaaaggggcaatcccatgcttgctgaaataaaggggttaaacgaagaatgtggcgttttcggaatttgggggcatgaaaatgcagcacaagtttcatactacggattgcacagtttacagcatcgtgggcaagaaggcgcaggcattgtcgtaaataatggggaaaaaatcgtcggtcacaaggggttaggtttaatatcagaagtgttttcaagaggtgagctagaaggattaaatggaaaatcagcaatcggacatgtacgatatgcaacagctggtggaagtgaagttgctaacgttcaaccattgttgttccgtttttccgatcatagtatggcgttagctcataacggaaatttaattaacgcaaaaatgcttcgtcgtgaattagaagcagagggcagtatttttcaaactagttcagatacagaagtacttttacatcttattaaacgtagcacgaaagattctttaattgaaagtgtaaaagaggctttaaataaagtgaaaggtgcgtttgcgtatcttttactaactggaaatgaaatgatcgttgcattagatccgaatgggttccgtccgctttcaattggaaagatgggggatgcttacgttgtagcatctgaaacatgtgcttttgatgtagtaggtgcaacatacattcgcgatgtagaaccgggtgaattacttatcattaatgatgaaggaattcacgtagatcgtttcacaaacgatgtagaacatgcaatttgtagtatggaatatatttactttgcacgaccagattctaatattgctggtgttaacgtccatgcagcacgtaagaatatggggaaacgtttagcggcagaagctcctattgaagcagatgttgttactggtgtaccagactctagtatttcagctgcgattggctatgcggaggcgacaggtattccatatgagttaggattaattaaaaatcgttacgttggacgtacgtttattcaaccttctcaagaactgcgcgagcaaggggttaagatgaagctttccgcagtaagaggtgtagttgaagggaaacgagttgttatgattgatgactctatcgtaagaggaacgacaagtaaacgaattgttcgtatgcttcgtgaggctggagcgacagaagttcacgtaagaattgcttcaccacctctgaaatatccatgtttctatggcattgatattcaaacgagaaaagaattaattgcagcaaatcatacagtagaagaaatccgtgaaatgatcggagcagattctttaacatttttaagcgaagatggattagtagatgcaattgggcgtccatatgaagggaaatatggcggcctatgcatggcttactttaatggggactatccaacagctctttatgattatgagcaagagcttttagaaagtatgaaataagaaaagtgagaaaagcttctacttcttttgatgtaggagctagatcctttcttaaaatagcccgccctggatggggagaaattaaaagacgaggtgtaaataacgatggcgaatgcatataagcaagcaggagtagatattgaagctggatatgaagcggtatctcgcatgaaaaaacacgtacaaacaactatgagaaaagaagtactaggcggtttaggcggttttggaggtatgtttgatctatcaaaatttgcattagaagaacctgtattagtatctggaacagatggcgtgggaacgaaattgatgctcgcttttatggcagataaacatgacacaattggtattgatgcagtagcaatgtgtgtaaatgatattgttgtccaaggagcagagccgcttttcttccttgattatattgcttgtggtaaagctgaacctagtaaaattgaaaacatcgtcaaaggtatatcagagggctgtcgccaagctggttgtgcattaatcggtggagaaacagctgaaatgccaggaatgtattctacggaagaatatgatttagctggttttacagttgggattgttgataaaaagaaaattgtaacaggtgaaaagattgaagctggtcacgtgctaattggcttagcatctagcggtattcatagcaatggttactctttagtacgaaaagtgttattagaagatggggaactatctttagagcgtatttatggccgcttagaactacctcttggtgaagaattattaaaaccaacgaaaatttatgtcaaacctattttagaactattgaagaaacatgaagtatacggtatggcgcatattacaggtggtggatttattgaaaatattccacgcatgttgccagaaggaatcggtgctgagattgaactaggatcttgggaaattcagccgatctttagtttgcttcaagaagttggaaaactggaagagaaagaaatgttcaatatttttaacatgggtattggtatggtagtagcagtgaaggaagaagatgcaaaagatgttgttcgtcttcttgaagagcaaggagaaatggctcgtattattggacgtactatacaaggagctggcgttacttttaatgggggcacagcactatgagtagattagcagtttttgcttctggaagtggatctaactttcaatctctcgttaatgcggtagaagaaaaaagattggatgcagaaattagtttattagtatgtgataaaccagaagcacgagctgttggacgggcaaattatcatcatattccgtgttttgctttttcagcgaaagcatatgagtcaaaagaagcgtttgaaaaagagatattaaagaagctagaagaatatgaaattgattatgttattttagctggatatatgcgtttaatcgggccgacgttactagaagcatacggcgggaagattattaatattcatccatcattactaccgagctttccgggtaaagatgctgtcggtcaagcgttagaagcaggtgtgaaagtaactggagtaacaattcattatgtagatgcaggtatggatacagggccaattattgcacaagaagcagtggttgtttctgaaggggatacgagagaaagcttacaaaagaaaattcaacaagttgaacataaattatacgtaaatacagtgaatcaaattgttcagtctgtgaaagaatcaactgttaactaacatacaaccaggggtgaaggataaatgaaaaagcgtgcattagtaagtgtttcagataaaacaggagtagtagaatttgttaaagggttactagaacaagggattgaagttatttcaacaggtggtacgaaaaagttactagaagaaaatggcttacaagtaatcggcatttctgaagtaactggtttccctgaaattatggatggccgtgtgaaaacattacatccaaatattcatggtggtctattagcagttcgtgataatgaaacacatgtaacacaaatgaatgagttaggtatagagccaattgactttgttgttgttaacttatacccatttaaagaaacaatcgctaagcctgatgtaacatttgctgatgcaattgaaaatattgatatcggtggcccaacaatgattcgctctgctgcgaaaaatcataaattcgtatcggtaattgtagatccagtagattatgatattgtgttagcagaactgaaagagaacggtgaagtagcagaggaaacaaaacgtaaactagcagcgaaagtattccgtcatacagcagcgtatgatgcgttaatttctaactacttaacagagcaaatgggtgaagaaagtccagaaacattaactgtgacatttgagaaaaagcaagacttacgctatggcgagaacccacatcaaaaagcaactttctataaagcgccattcgcagcaacgtcttctgttgcatacgcagaacaattacacggtaaggaattatcgtataacaatattaatgatgcagacgcagcgcttagcatcgtaaaagaatttacagaaccagcagtagtagcagtaaagcatatgaatccatgtggtgttggagtaggaactaatattcacgaagcatatactcgtgcttatgaagcagatccagtatcaatcttcggcggtattattgcagcaaatcgtgaaattgataaagctacagcagaaaagttacatgaaattttcttagaaattgttatcgcaccttcgttctcgcaagaagctttagaagtgttgcaaagtaagaagaacttacgtttattaactataaatattgaaaaagcgacaagtgcaagcaaaaaactaacttctgtacaaggtggacttctcgttcaagaggaagatacgttatcattagatgaaagtacaatttcaattccaacgaaacgtgaaccctcagagcaagaatggaaagatttaaaactagcttggaaagttgtaaaacatgtgaaatcaaacgcaattgttttagcgaaagatgacatgacaattggtgtcggtgcgggacagatgaaccgtgtaggttctgcaaaaatcgcaattacacaagctggtgaaaaagcacaaggtagcgcgcttgcatctgatgctttcttcccaatgccagatacattagaagaagcagcaaaagcaggaattacagcaatcattcaaccgggcggatcaatccgtgatgaagattctattaaagtggcagatacttatgggattgctatggtgttcactggcgtacgtcatttcaaacactaatagaggatgtttaaaaagtccggttaagataaccttcgcatgtcgtcgttgcatcgccagtgcggtactcatgtagaaaagctacactccgtgtcctcctggcaaatgcgcctagacctgctcggttctcttaatcctcctttttaaacctttattgatatggatgtttaaaaagtccggtcgagataaccttcgcatgtcgtcgttgcatcgccagtgcggtactcatgtaggaaagctacactccgtgtcctcctggcaaatgcgcctagacctgctcggttctcttaatcctcctttttaaacctttattgatatggatgtttaaaaagtccggtcgagataaccttcgcatgtcgtcgttgcatcgccagtgcggtactcatgtaggaaagctacactccgtgtcctcctggcaaatgcgcctagacctgctcggttctcttaatcctcctttttaaacctttattgatatggatgtttaaaaagtctggtcgagataaccttttattgatatgaaaaagcaaactaggagcatagcttctagtttgtacttatttaattattgggggatgaaatatgaatgttttagtaattggccgcggtgggcgtgagcatgctttagcttggaagtttgcacaatctgaaaaagtagaaaaggtatatgtagcaccaggtaatgaaggtatgagagatgttgcaacaccagttgatattgatgaaaatgattttgatgcattagttttatttgcaaaagagaataatgttgagttaactttcgttggaccagaaattccgcttatgaatggaattgttgatcgttttaaagaagagggacttcgcgtatttggtccgaataaagcggctgctgttattgaaggtagtaaagcttttacaaaagagcttatgaaaaagtatgatattccaactgcggcgtacgaaacttttacagattatgaagaagcagtacagtacattcaaaaagttggtgcaccaatcgttattaaagctgacggcctagctgctggtaaaggtgtaacggtagcgatgacgcttgaagaggcattacaagctgtgaaagaaatgctgcaagatgtgaaattcggcgcggcaagtaagaaggtcgttattgaagagtttttagatggacaagaattttcattaatggcattcgtgaatggaacaactgtacatccaatgataatcgcccaagatcataaaagagcttttgatggtgataaaggtccaaatacgggcggaatgggtgcatattctccagtaccacaaattccagaaacagcagttcaagaagcgattcaaaccgtattgcatccaactgctaaggcgatgattgaagaaaaccgttcgtttacaggtattttatacgcaggtcttattttaacaaatgatggtccgaaggtaattgaatttaatgcacgcttcggtgatcctgaaacagaagttgtattacctcgattagaaaacgatttagttgatgtatgtaacgctgtattagatgaaagtgaactaacgttacaatggtcagaagaagcggtaatcggtgttgtacttgcttctaaaggatatccagaagcatataaaaaaggtgatattattagcggactagatgcactgcaagatgtgattgttttccatgcaggtacagcaatgaaacatggggactttgtaacgaacggtggccgtgtattatttgttgcttgtaaggcaaatagtttacaagaagcaaaagataaagtatataaagaaatcggtaaaattgagagtgatggtctattttatcgaagtgatataggatatcgtgcaattgggcatgagatgacgaaaagttaatatgtaaaaatcccgctgaggaatcagcgggattttttatgcatcttcatctttttttaatttccctttttgctttgccatttctcgaagtaaatactcgatgtgtgcattgacgctacgaaattcatcatttgcccatttttcgatgactgcgtgtaattcaggatcaatacgtaatggaaagcttttctttttagccataattacttatagcccttagtataggcttcctgtattaataactggctgcgcacctttatctgaaacgatggcaactaataagttgtttaccatatttgctttacgctcgtcatcgagttctagtacgccttcttcatctaacatatggatggaatctttcgccatcttcacagcaccttcaacaatttcttttctagcagctaatactgcttttgcttgctggcgttgtagcattgcatgggcaatttctgttgcgtaagctaagtgcgttaaacgagtttctaatacttctacaccagcaatttcaagacgcgcctctaactcacgttttaattcttcagagatttcttcagtatttccgcgtaacgtaacgcaggtttcatcttggaaattgtcataaggatattttgttgcaacatggcggattgccgtttcgctttgaatttctacaaatcgatcataatgttcaacaccaaacattgcttttgcagaatcaacaactttatatacgataacagctgcaatttcaattggatttccatcaacgtcatttacttttaattttttactgttaaagttttcaacacgtaaagatacagtttgacggaatgcgaaaggaatcgttaaaaataaaccgttttgacgaattgttcctaaataattaccgaagaacgtaataaccttcgcttgattcggttgaacaataccgatacctgtagcgagaactgcggctaatataatagttagtgccgctcctatgaaaatttcttgtgcaaggaaaaatacaccgatagcagctaaaatcaaaattccaataataccgagaaaaccatttacataaaatacttgtttttctttcatatgatcgcctcctgatataaaaatgatatcacttttatatcattttaagcaagaggtatgcatctaattttctgaattttattggttgatatcttttatatacattttaaggttcaaaaagagaatatacgttctgttttatagtaaaataaagaagacttaaccgcccactgcagcagctaagtccctttgagagcatcttgcatcgtgacaaatgattcaaagcggttttgccaggattatatcttcaatcgctgactcaatctctttgtcagaagcgtcataacttccttttgactctggcttgtcatgagtggaagtttgattcacttcttctttagcatgtcctttttcaccaaaattcatgctaggcattttaaatgcccccatattcatgtattttccgaatttccacatttcaacaacagggcagaaacgaacaattccttctgcaactttcattgcaccaatccatagaaaaatgttagaccaagtgcaccacggcttgcgtacaagtttagttgcactacatccgaagaggacgagcccaagtgtaattcgaattagagcgtttattgtcccgatattttgcttcattagaaaaacactcctttttatgaaagttgaaatagataatactatttctcttattagtatcccgtttgatttttgggatatgtaatccaacatttgacgtggaaaaagatgttggattgtgcgtgtgtgtaagtaactttttttgttataatgaaagaatgcataaaaggaacttcaaaattaaatcctctagtttaaaaaatatggaagaggtaattccaaacttaattctccgttttaaacaaatatttaagatgaagttaaaacaataatgatgaaaataaactgttattttgaacagaaatatatataactagagaaaaggaagggtgttttcatgtacgatatttccggatggaaacatgtatttaagcttgatccaaataaggagttaagcgatgaacatttagaaatgatttgtgagtctggaactgatgcggttattgtaggcggaagtgatggagttacaattgataacgtattacacatgctagttagcattcgtagatatgcagttccttgtgtattagaggtttctgatgtagaagcaattacaccaggatttgatttttattacatcccaagtgttttaaatagccgaaaagtagaatgggtaacaggtgttcatcatgaggcattgaaagaatttggggatattatggactgggacgaaatttttatggaagggtattgtgttttaaatccagaagcgaaagtagcccagcttacagaagcgaaatgtgatttaacagaagatgacgttattgcatatgctcgtttagcagacaagctattacgtttaccgatattttatttagaatatagcggtacgtatggagatgttgaacttgttaaaaatgtaaaagcagaattgaaacaagctaagttatattatggcggtggtatttctaatgcagaacaggcgaaagaaatggcacaatatgctgatacagtagttgttggaaatattatttatgatgatataaaatcggcgttaaaaatagttaaagcagtaaaaggagagtaggtgcaggcgtatatgagtatgacagataagttattaaacggtttaaatccacagcaacaaaaagcagtacaaacaacgaatggaccacttctattaatggcaggtgcaggtagtggtaagacacgtgtgttaacacatcgtattgcgtatttacttggtgaaaaaggtgtagcaccatggaatgtactagctattaccttcacaaataaagcagctcgtgaaatgcgtgagcgtattgatacacttgtgggaccagaagcagaagatatttggatttcgacgttccactctatgtgtgtacgtattttacgacgcgatatcgatcgtattggtattaatcgtaactttacaatcttagattcaggtgatcagctaactgtagtcaaaaaaattatgaaagagcgcaatgttgatccgaagaaatttgagccgcgctctattttagcgggtattagtaatgcgaaaaatgaactgttatctgcggataaatatgcaaaaaaaattacaatggctgatccatatgaaaaattaacgagcgatgtatacacagagtatcaaaaacgtcttttgaaaaataattcattagactttgatgatttaattatgacgacgattcagctatttgaacgtgttccagaagtattagagttttatcagcgtaagttccaatatattcatgttgatgagtatcaagatacgaacaaagcgcaatatcttcttgttaaacatttggcagcgcgttttaaaaatctttgtgttgtgggtgactctgaccagtctatttatcgctggcgtggtgcagatatttctaacattttgtcattcgaaaaagactatgagaatgcacaagtaattctgttagaacaaaactatcgttcgtcacaaaatattttaaatgcagcgaatgctgttattgaaaaaaatacgaatcgtaagccgaagaaattatggacagacaatcaagttggaagtaaaatctcgtattatcgtgctgcaactgaaaaggacgaagcgtattttgttgcaaaaaaaattcgtgacgatattcaaatggggaaacgaaaatatactgattttgcagtgctatatcgtacgaatgctcagtctcgtatggtcgaggagattttccttaaatctaacattccgtataaaattgtcgggggtacgaagttctacgatcgtaaagagattaaagatattttggcgtacttacgtttaatcggtaatccagatgatgaaattagttttgcacgtattataaatgtgccaaagcgtggcattggtgcgacttctatcgataaaattattaattacggtgtgcaaaatggaatttcattaactgctgtatttgatgagattgagcatgttggagtaagtgcaaaaattacaaaggcagtaaaagaattcgcgaatttattaaataactgggtaaatatgcaagagtatttatctgttacagaattagtagaagaagttattgaaaaaacaggctatcgcgatatgttgaaaaatgaacgttctttagaagcggaaggtcgtttagaaaacttagacgagttcttatctgttacgcaaacatttgaatctcaaagcgaagataagagccttgttgcattcttaacagatttagcacttgttgctgatattgatcgtgtagatgaagacccaactgctggtgaagaagttattttaatgacgatgcactcggcgaaaggattagagttcccggttgtctttattgttggcttagaggaagggatattccctcatactcgttctcttatggaagaggatgaaatgcaagaagaacgtcgtcttgcttatgtaggtattactcgtgcagaagaagagctatatttatctaacgcgcaaatgcgtacattatttggtagaacaagtatgaacgctgcgtctcgatttattacagaaatcccgacagaactagtggaatcattaaatgaaacagcgccgaagcgtgaaacatcgtttggtacaaaaggcagaacggcaagtagcggcaaaacgacaatcacaacagcaacacgctctcgttcagctttcgcgcgccctgcagctaagacgacaggcggcgaacaaattggctgggcagtaggagataaagcttcccaccaaaaatggggagtcggtacagttgtaagtgtaaaaggtgaaggtgatgcaaaagaattagatattgcgttcccaagcccaattggtgttaaacgtttgttagcaaaatttgcgcctgtgacgaaacaataggaaaggaatgaggatatgtcaaaagagatagtaaaaaaacgtatagaagaattacgtgacttgttaaatacatttaactatcaatatcacgtattagacaatccttctgtttctgatgcggaatatgaccgtaatatgcaggagcttataaaattagaagcagagaacccagagtttatgagtgaagattctccctccgttcgcgttggggggactgttcttgatatatttgaaaaagtaacacataagtcaccaatgttaagtttaggaaatgcatttaacgaaggagatttacgtgatttcgacagaagagtacgtcaaggaattgatggtgcgaatgtaagatatatatgtgaattaaaaattgacgggcttgccgtttcgcttcattatgaaaaaggacgcttcattcaaggggcgacacgtggtgatggtgtaacaggtgaagatattactcaaaatttaaaaacgattaaagctatcccacttcgtttaaatgaagaagtaacgttagaagcaagaggcgaagcttatatgccgaagcgttcattcgttaaactaaatgaagaaaaagagcaaaatggagaagatgtatttgcgaatccgcgtaatgcagcagcaggttcaatacgtcaacttgatccgaaaattgcagcgaagcgtaacttatctatgtttgtgtatggtcttgcgaatgtagaagaaaaaacaatttcatcacatagtgaatcgctggatttcttaggtgaacttggatttaagacaaatccaaatcgccgtacatgtgaaacaattgaagaagttatagcttatgtagaagaatggcaagaaaaacgtccgcatcttgattatgagattgatggaatcgttataaaagtagatgatgttgctcttcaagaaagtctaggaactacagcgaagagtccaaggtgggcgattgcttataaatttccggctgaagaagttgtaacgagattaacaggcattgaattaagtgttggccgaacaggggttgtaacaccgactgcagaactagagccagtgagagttgctggtacgattgttcgtcgtgcttctttacataacgaagatttaattcgtgaaaaagacattcgaattggtgactacgttgttgtgaagaaggctggagatattattcctgaagttgtgaacgttatttttgataagcgtactggtgaggaagaagaataccgcatgccaactcattgtccagcatgtgagagtgaacttgttcgtttagaagaagaagtagcacttcgttgtataaatccaacttgtcctgctcaaattcgagaagggttaatccatttcgtttcaagaaatgcaatgaatattgatggacttggagaacgtgtcattacacaactctttgatgctgattacattcgtacatttgctgatttatatgcattgacgaaagagcaattattacagttagaacgttttggtgaaaaatcagcaacaaacttaatacaagcaattgaaaattctaaagaaaactcgttagagcgattattatttggtcttggaattcgccacgttggagcgaaagcagcacgtacatttgcagagcactttgaaacgatggatgagcttgtaaaagcaacggaagaagaactaaaagcaattaatgaaattggcgaaaaaatggctcaatctgttgtgacatattttgataatgaagatgtattagagttattacagcagtttaaagagtatggcgtgaatatgacatacaaaggtataaaaattgcagatttacaaaatgttgaatcttacttcgcaggaaaaacggttgttttaacaggtaagctagaagttatgggacgaagtgaagcgaagaagaagattgaggcattaggtggaaaagtaacaggaagtgttagtaagagtacggatttagttgttgcaggtgaagcagctggttcgaaattagcacaagcggagaaacataatgttgaggtttggaatgaagagaggttcttacaagagctaaataagtaagaggtgcaaacttaccatgaaaaaaatagcattagcggtattaagccttggcctacttgtaagtgggtgtagtgcaggtgccgacaaagatgaaaaagtggctgggaaatcggggaaagcaaaagaacaatcagttgttccaaaatacgctatttcggatgaatattataagacgactattccatttgatggtggaaaggcacgtggtttagtggtgcaagggttaaatagtcgccttgatatagatgaatttgaaacaggattaatgcgaattgcaaaagaatcatttagtacgaaagataattttttaaaaggcggaaaagctctagatactcaaactatacagatgcttgttaaaagaaaacgtacagatgctgaacaaaaggaactagaggaaaaattaaaaaaagatgcagttaaatttccaaatataggattaaatcctgcgttaggaacaggatccgaatcactagaagtgaaaaataaaaaaaatccaatatatatttcaaatattttagagcatgattattatgtgaaaaaaggcgataacggcgaggaacgtgttggtatggtagttggattagcgatgaattctgttcaatattttaacgaagagcatggttacccacgtgaagctgcaatcccagatgaaaagatgttagctgaagggaaaaaaatggcgcaagaaattttgaaagtcatacatcaaaaagaacctgaaacaaaaaatattccgataacatttgcgatttatcgccaagctccaaagtcttcgctcgtgccaggtaattttgtttcttatgcaaatgtcgaaaaaggtagtgaaacggttgaagattggaaacaaattaatgaaaaatattatttgttcccatcagagcaagcgaaaacagataataaacgtgaagatcttgcaagagtatccaactttaaggcaaaactaagcgattatttccaaggcgactatacagctgttattggtactggtatgtatagagatgatgaattaagagaaatgaagcttgatattcctgtccagtttaatggaaaagcggaaatagttggttttacacaatatgtggcagggcttgttatggaatacttcccgaattatatgaaagtacaagtaacgattaaatctgtagaacgcccagaagctattattatacgtgaagcaaaacaagatgaaccacttgtgaaaattttagattaaatatgaaggctgttcctctatggaacagctttttttcttatgtaattttgttataatttaaaatgttgtaaaaaataggggtgaggggtaaagctcatggaagaattaagttttcaagtcattattttattaattgcattcggttttttagcagcttttattgattccgttgttggaggaggagggttaatttcgcttcctgcacttatgtttgttggcctatcgccagcttcggcaattgcaacgaataaattagcggcaacaatggggacgtttacgagtgcgatgtatttcattcgatcaggaaaagttgattttaaaattgtaggaaagttaatcccgttaactattgttggagctgttgcaggtgctttagtagtaaaatttattccatcggatattttacgcccattagtacttgtaatgttggtatttattgctatttatattattgcaaaaaagaattggggaagtgtgtctacctataagaagatgacgcaaagaaaaacattaatatttttctttgctattttaatgataggattttatgatgggttttttggaccagggacagggtcgtttttaatttttgcatttttattaattggcttggattttattcaagcggcagcatctggaaaacttttgaactttgttagtaatattgtatctttaattacttttttattcttagacataattcattttgaatacggtattatcatgggattatcaatgatcttaggtgcttattttggatcgaagtttgcggttcaaaaaggtgttggatatgtaaggactttatttttattagttactatattattgatcgggaaaaatgttttggaatatactcatattttgtagattcatacgcatgtatgaatctcttttttttattatattttaaaaatttattaatttttaaaatataagtctaggaatatttgaataaatctaaattatcgtgtagaataatgttgtaaaatgtaaacgtttttctaaggggaggctaaaaaaaatggtagtagcatacaaacatgagccatttacagatttttcagtggaggctaacaaattagcgtttgaagaaggtttaaagaaagtagaatcttatcttggacaagactatccattaattattgggggagaaaaaatcactacagaagacaaaattgtttctgtaaaccctgcaaataaagaagaacttgttggtcgtgtttcaaaagcaagccgtgagttagctgaaaaagcaatgcaagtagcggatgaaacattccaaacttggagaaaatcaaagccagaaatgcgtgcagacattttattccgtgctgcagcaatcgttcgtcgcagaaaacatgaattctctgctattcttgtaaaagaagcaggtaagccatggaatgaggcagatgctgatacagcagaagcaatcgactttatggaatattatggtcgtcaaatgttaaaattaaaagacggtattccagtagaaagccgtccaattgaatataatcgtttctcttacattccattaggagtaggtgttatcatttctccttggaacttcccattcgcaattatggcaggtatgacaacagctgctttagtttctggtaacacagtattactaaaaccagctagtacaactcctgtagtagcggcgaaatttatggaagtattagaagaagctggcttaccagctggtgtagtaaacttcgttccaggtaacggttctgaagttggtgactacttagtagatcatcctcgtacacgtttcgtaagcttcacgggatctcgtgatgtaggtatccgcatctatgagcgtgcagcgaaagtaaacccaggacaaatttggttaaaacgcgttatcgctgaaatgggcggtaaagacacaatcgttgttgataaagaagcagatcttgaattagcagctaagtctatcgttgcatcagcattcggattctcaggacaaaaatgttctgcatgttctcgtgcagtaatccatgaagatgtatacgatcacgtattaaatcgtgctgttgaattaacaaaagaattaacagttgctaacccagcagtattaggtacaaacatgggtcctgttaatgaccaagctgcatttgataaagtaatgagctatgttgcaattggtaaagaagaaggtagaatcttagcaggtggcgaaggagacgattctaaaggctggttcatccaaccaacaatcgttgctgacgttgcagaagatgctcgcttaatgaaagaagaaatcttcggaccggtagtagcattctgtaaagcgaaagacttcgatcatgcacttgcaattgcaaacaatacggaatacggtttaacaggtgctgttattactaacaaccgtgaccatattgaaaaagcacgcgaagacttccacgttggtaacttatacttcaaccgtggatgtactggtgcaatcgtaggttaccaaccattcggtggctttaacatgtctggtacagactctaaagctggtggacctgattacttagcacttcacatgcaagcaaaaactacttctgaaactttataagaaatagtagaggagctcttcacagaatgtgaagagctccttttaaaattgaaaccccatatattaccgtcgttcgaagagaatgagctaaaacctattaatagcgtgataaacatgtgaacagaaataaaatgatgagaaaagttgacttattagtcatattttttagtattcattttgagaatttcctgtataatacaatttgaaagaaaatctatggttcgacaaggaacactcctttcagttttgctcactgaaaggagtgtttttttatgtagctaaaaattcttgcgtgcttattacatttgcatatacgccatttaaactagctaaaattgtattgtgaatataaacagctggtatagtagcgttcttaaaagaaaggtcttttgtagcacaagcgtcatgtataacggtacattgaaagccaaaatcgaatgtagcccttactgttgcatcgatacacatatgagtcatcatcccgcatacaacgacatgttcaatatttaaacgttttaattgctctagaagattagtttctcggaagctatttggataatgtttgactataactgtttcttctctaagtggacgtacgctttcatgaatatgtacaccttctgtattaggtaggaaaaaagtagcgtcatcttttatagctacgtgttggatatgaaaaataggttcgctgtttgttctaaattgttgtaataactgattagcatattcgcttgcttctactggattacgcaattccatctttccatttggaaaataatcgttttgaatatcgacgagtaaaagagctgttttcatatatttatcttcctccgagtttcatattcaaataaatttattcaattcgtagagaggattctcctgtttaaaaatatgaggaagaagaattttaaataaccttgaaagttactaattttcagatgaatattcatctgaaaattttaataaaggaataattaatatttttctaaaaaatgtattgactcttattattctgagttctataatgagaattaattaaacgacaattaaatcgatacattcttatccagagaggtggagggactggccctacgatacctcagcaacgggtttttttaataccgtgctaactccagcaagccatataaaggcttggaagatgagaagatgtgaacgagtacatataagtgctctccttcttatctttatggttgataagaaggagggcactttttattttacctcgaaagctctgcttcaagtttttacagcatataggagggaaaaaaatgatttcttttaccaatgtaagtaaagtgtatgaatcagctggccaatctgttcatgcggtggaggatgtaacattatcagttgagaaaggcgaaatttttggcattatcggttttagtggcgctggaaagagtacgttattacgcttagtaaatatgttagagagaccgacggcaggaacgatttcaatagatgataaagatattacatcattatcgacgaaagaattgcgtaaactaagacaaagaatcggaatgatttttcaaagttttaatttatttaattcaagaacagtatttggaaatattgcttatccattaaagttagcgaaagtaccaaagaatgagataaaagaaagagtaaatgaactgctgaagtttgtagggttagaagataaagcaaactattatccagagcagctatcaggtgggcaaaagcagcgtgtgggcattgctagagcacttgcgacatcgccagatattcttatatgtgatgaggcaacatcagccttagatccagaaacgacgacagaaattctaaacttattaaagaaagtaaatcgagaatacaatttaacaattcttcttattacacatgaaatgcatgttgtgaaagaaatttgtcaccgtgtagctgtaatggagaaggggaaagttattgaagaaggaaaactgtttgatgttttcacgcaaccaaaaacaaagacgactcaaaactttgtacgttctgtcattaatgatcatttaccggaaagtgttctagcgaaaattcaaaatggtggtcaaatttatcgtctaacatttactggtgaggagacaggacagccggtactatcatatatcgcaaaaaactataacgtcgatgtaaatgtactgtacggaaatattattgaacttcaaaatgtgctatttggaaatcttcttgtagagttgcaaggtgagcagagggaaattcaaaaagcattacaacatctaagactgcaagtgcagctgaaggaggtagaagctcatgcgagttgattggagtatattttggccgcgcatactagatgcgacgggggataccctcttaatggtaattgtaacccttatattcgctacaattctgggtatacctctaggtttacttttatatgtaacgagaaaaggaaactttttagaaaataaatgggtcttttctattcttaacatcataattaatacaattcgtccggtaccattcattatctttttagtagccttaagtccactaacaagaagtgttatcggaacgacgattggaacagcagcggcaattttcccgatgacgttagtcgcatcaattggtattgctagaatggttgaaacaaaccttgtttccgttccgaaaggagtaattgaagcagcgcaagcaatgggcgcctcaccaattagaattgtttttgaaatccttgtaccagaagcgttagcaccattaatcttaggtgtcacatttatgacagttggtttaattgaattctctgcagttgctgggcttgtcggtggtggcggtcttggtgacttggcaatgacatatggttatcaacgttttgatacatcagttatgttcgtaacggtcgtgttacttatcattctcgtacagatagctcaaaatttaggaaactactttgcgaaagtcttgttacgcagatcataaaaaggaagagaggaaaagaaaatgaagaaaattttagcatttgcattatcagcgattgtaggagtctcagcattaagcggctgctcaagtggagacacgggtgcaggagcgaaagaaaaagtagttcgcgtcggtgtaactggaacggatggagacgcttgggaaattttgaagaaaaaagctgaaaaagaagggattaagattaaactggtcgagttctctgattacacaacgccaaataaagcgttagctgatggagatattgaattaaactcattccagcatattgctttcttagagcaatttaaaaaagagcataagttagatattacagctgttggtacaacgcaaattgcgccaatgggtttatactctgaaaaatataagaaagcaaatgaaatcccagatggttcagaaattgcaattccaaacgatccaacgaaccaagcacgggcattaaaacttcttgatgcagctggattattaaagcttaaaaaagactttggtctatttggagatccaagtggtattgctgaaaatccgaagaaattaaaaattacaccggttatcgcacagcaaacacctcgtgtgttaaaagatgtagcggcatcagttattaataacggtgttgctggtcaagctggattagatccagcgaaggatcctattttcttagaagatccaaagaatgaaaatgcaaagccatatattaatatttttgcagctcgtaagaaagataaagatgatccaacattgaaaaaagtaattgaactatatcattcaaaagaagtaacagacgcaattaagaaagaaacaaatgatggttccatttcagtagatctttcacttgatgagcttgaaaaaatcgtaaaataatcattgggtttaatggactaacagaaggaacccctccgctgttagttcgttcaacatataaacttaacaaacaaaccctaattctgtaccttccaattttgtataacatagaatccaatgtttgttaagtagagtgatagaccaggaattttcctggtctttttttatgaatgaaagtagctagcgaacagtaaggtgatccaaattataatgggataagaaaataagctgaaaaggagtgtaattacgaattgctttggatgaattaagtgtttttttgataaaaaaaagaaaatagaaaagagagtaatgaaaaatgctgatattacgccggggttataagagcgataaatgaaaaacaaaataatatgttgaacagagttgaagaagatggccccttgtataaaaataatccagcatatagaagacaagaagttaagttgatatagaaagacgataagtaatacaaagattgttaatacggaaatggcgatgaaaaattgttggctagttataagacggattgaaaattgattagcaaggtattgtggcatttggaaagcttcttcaaggttatgaatgaaaaataataagggaatgatccagaatatagtagtggaatgttttttcatcaatttacatcactccaataaagtatagaaagcctaaaaaaaggccctctatacagagatggttattcaattatgatattttttaaattaacttcatgatgctctcgttctttcagataagcagctagttcctcttgtaaaatatttaatatttgcttagctgattgttggattggattaggtagctcttctaatatatgcatcccgacttttacttttgtacgaattacccttcgtagtaattcctcatgcatgtactacacctccaaaccgaatatttagtacatcttcttcaaattttgctccttgaatagaaaggtgtgttaatgtttttggtaacgtgatgttccgtttaacagaacccgctcgaataataagttcatcacctttttgatttaaggaaagttcacttttgtttgagaagggaatggacagaacgaaaatatactcatcgccatccttttttacatattgagtgcgcccgttaaattttacttctgtaggggaatgatcagttttaaataaagaatctcctacacgttctaacatagacaaaccaacaacttcttgttcaaacattggagcttcgtaaataggaaggggttgaaaactatctttaattaatgttttatatttcttctgtgtatctttccatgcctgaaaataaggatcggtgacagtgttagggatgacgcggttaatcataatggcatctacgttataatcgtataaattcaaataagtaaagctgcgctgggcttctttaatgaccattttttcaggatttacaacgatgcggatacttgttacttctcgatttgataaaatatctctcatttctccgagctgttcaagtgtacttgttaattcgtccataatatcgtcggttggaagagggacaccaaggagtggttgagctacaggacgaacgacttttaaaacttttcttttaataggaaataatttttccatccaccagccgagcatgtctggaaagcttagcattgctaatgtttctcctgtaggggcacaatcaataatgataacatcatatgtgtcttgcttataataatcgagtacgcgaagtaggctaattaaatcttccataccgggaaacatcgttaattcttctgttgtaatatcatcagctgctttagaagtgaagagtagtgtaatatatttctgtaattttccccagcctttttccatttcataaatcgtattaatttcttgtgcccacaaattttcacgaatttctagtggttcagaagatagctttataccaaatgaatctcctaaactatgagcaggatctgtgctcattactaatgtttttaatccttgtttcgcactttgaattgctgttgctgctgaaatgctagtttttcctacgccgcctttacctgtatacaagataattctcatcattcatatcccctttgtttcgaatgtcgaatattacgagtgtcgaagtaaatggttgaataaaaacccagatagggttttattcaatcggaatgtttttcattttaggtgtagaaatcttttcttctgttttttgctgtgacgtagcgatgtgattcatgattttttggaagatttgtagtaagaatgctttttcttcttctgataatgcttctgttactaagctaaagtaatgggccgcattttgttttacttcttgaacgagcattacgccgttttctgttaaccgaattaatacaatacgtcggtcattttcatcacggtagcgttcaatatatcccttttttacaaggcgatttacaacgcccgttgttgtactcatcggtatatcaagaagatcagcaattttcgtcattgtaatatctgtatttcgttccatccaaagtaaacaaaatacttctgttttagaaagtgttaaatctaggcttacccattcttcaggatagaaaagtttcttggcgttatctagcagtaagtctaaaaaatgttcatattgcaacaattaattccactcccgtatatttcgaggttcgtaatatttatttttattttatgtagaatagaaataattgtcaatgattttaattgttttttcagattaggcagaaaactttctttaaaatagtattcttttatgatagatttataaatataaaacgagaatttacataaaaatccatcatggtaaatatacttatctataatgggtatgcagctaacgagggggagaacgatgagaagacgtaatacgcaagcgttcacgtttttagcatggacttcatttgtttgtgcgatttcaggtatgctaattgggatttatacgttagatgaaacgcttagtgtaaaaggatactatttaattggaacattatttttaacgatgtcttgttttgtattacaaaaaacaattcgtgataatgaagaagataacgagagatttccgaaaaataaaccgttagataaagagtaaattgtaaagaaaggcatttgcctttctttttttatgtaaaaatggcgtaagtactctgtgttgacttgcttgaagtactgaaaatttggtatcatcaatagtattgtagattgaacgatatattatggaggtggcctagccgtgtcaagaatttccgttgagaatgtaaagcacgtagcacatttagcacgtcttgcaattactgatcaagaagcagaaaaatttcaaaaacaactagatgcaattgttacatttgcagaacagttaaatgaattagatacaacagatgtaaaaccaacaactcatgtattaactatgaaaaatgttatgcgtgaagatgtaccagaaaaaggtttaccagtcgaagaagtattaaaaaatgcaccggatcacaaagataatcaaatccgtgttccagcagtattagaatagaggaggggaatttcgatgtcattatttgatcattcagtatcagagttacataagaagttaaacaacaaagaaatttccgttacggatttagtagaagaatcttacaaacgtattgcggatgttgaagataacgtaaaagcttttcttacattagatgaagaaaatgcacgcgcaaaagcgaaagaattagatgcaaaaatcggcgctgaagataatggtttattattcggtatgccaattggtgtaaaagataacattgtaactaacggtcttcgtacaacttgtgcgagcaaaatgttagcaaacttcgatccaatttatgatgcgacagttgtgcaaaagctaaaagctgctgacacaattacaatcggtaaattaaacatggacgagttcgcaatgggttcttcaaatgaaaactcaggattctacgctacgaaaaacccatggaacttagattacgttccgggcggatctagtggtggttctgcagcagctgtagcagcaggagaagtactattctctctaggttctgatacgggtggttctatccgtcagccagctgcatattgcggtgttgtaggtttaaaaccaacttatggacgcgtatctcgttacggattagtagcattcgcatcttcacttgaccaaatcggaccgattacacgtacagtagaagacaatgcatacttattacaagctatttcaggtattgaccgcatggatgcaacttctgcaaacgttgaagttggaaactatttagctggtttaacaggcgatgttaaaggtttacgcattgctgtaccgaaagaatacttaggcgaaggtgttggcgaagaagctcgtgagtcagtactagctgctttaaaagtattagaaggtatgggcgcaacttgggaggaagtatcgcttccacactctaaatacgctctagcaacgtattacttactatcttcttctgaagcatctgcgaacctttcacgctttgatggcgtgcgttacggtgttcgttctgataatgtaaataacttattagatctttacaaaaacacacgtagtgaaggtttcggtgatgaagttaaacgtcgtattatgcttggtacatttgcgcttagctctggttactatgatgcatattacaagaaagcacaacaagtacgtacattaattaaaaacgactttgaaaatgtatttgctaactatgatgttattattggaccaacaacgccaactccggcatttaaagtgggcgaaaaagttgatgatccaatgacaatgtatgcaaatgacattttaacaatcccagtaaacttagcgggtgttccagcgatttctgttccatgtggattcggtgctaacaacatgccacttggtctacaaatcattggtaaacacttcgatgaagcgacaatttaccgcgttgcacatgcgtttgagcaagcaacagactatcatacaaaaaaagcaagtctgtaaggaggcgagcatagatgaatttagaaacaattattggtttagaggttcacgttgagttaaaaacaaattcgaaaattttctctgcgagtccaacagaattcggagcggagccaaatacacaaacaagtgtaattgacttaggatacccaggggtacttcctactttaaataaagaagcagttaactttgcaatgaaagctgcaatggcattaaactgtgaaatcgcaacggaaacgaagtttgaccgtaaaaactatttctatccagataacccgaaagcttaccaaatctctcaatttgataagccaattggtgaaaatggttggattgaaatcgaagtagacggtaaaaagaaacgtatcggtattacacgtcttcatttagaagaagatgctggtaaatcaacgcatacagctgatggttcattagtagactacaaccgtcaaggtatgcctttaatcgagatcgtatctgagccagatatgcgtacgccagaagaagcatatgcatacttagagaagttaaaatcaatcattcaatacactggtgtatctgattgtaagatggaagaaggttccttacgttgtgatgcgaacatttcccttcgtccagttggacaagagaagttcggtacaaaagcggaactgaaaaacttaaactcattcacttacgtacaaaaaggtcttgagcatgagcaagtgcgccaagaaaaagaactgttatctggtggcatcatccaacaagaaacacgtcgttatgatgaagcaacaaagaaaacaatcttaatgcgtgtgaaagaaggatctgacgattaccgttacttcccggagccagacttagttgaactttacatcgatgatgagtggaaagaagcagttcgagcttctattccagaacttccagatgcacgtaaagctcgctacgttgcagaattaggcttaccagcttatgatgcacacgtgttaacattaacgaaagagatgtctgatttctttgaagcaactgttgcagacggtgctgatgcgaaattaacatcgaactggttaatgggtgaagtacttgcatacttaaacaaacaacaaaaagaattaaaagacgttgcattaacgcctgctggtttatctaaaatggttcaattaattgaaaaaggtacaatttcttctaaaatcgcgaagaaagtatttaacgaattaattgaaaaaggtggagacccagaagaaatcgttaaagcgaaaggtcttgttcaaatttctgacgagggtacacttcgtaaagttgtaacagaaattcttgataataatgagcaatctatcgaagactttaaaaacggtaaagaccgtgcaattggcttcttagttggtcaaattatgaaagctacaaaaggacaagcaaatccaccacttgttaacaaaatcttacttgaagagattaataagcgataatagtagtgacttttaaagattaagcagaaaaacacccgtacatgggtgtttttctaggttaatcaaacgtttgtttaaatgagacaaaatcgtttaaacaaacgtttgattaactgtcaaaagtggaaaaatgtttgtatagcaactatggtatgatagttgcaaaaaggtgggaataatgataaatctaaacatagaggtttttttcatctcatgaaataatagatagttattattcgttatatgtaaatttttatggaagaatggatagaaataaagtgaaactttaatcagtaggaggttcatccaccattgattattagccctcaccaatcgggcatttactgcccgcaaatagcgggataaattttgaagtcaaataaaaaaccattgaaatgaatatttacttttgatggactacacgaatcgggttcttactgcctgtttgagcgggataaaagaaggatagcaagatgagaggaggtaggcatgggaatactgaatagaagttcagtatgttctttttcgatacataaagaaatttcctgtgctaataaatgatgaagcgagcaagaattatttataatcctacttcggggcgtgagctatttaagaagagcttaccagaagtattacaaaaattagaacaagctggctatgagacatcttgtcatgcgacaacgggtcctggagacgctactgtggcggcgaggcaagctgcggatcgtaagtttgatgttgttattgcggctggtggcgacggtacattaaatgaagtagtaaacggtttagttgggcatgaattccgtccgaaatttggaattattccagttggaacgacaaatgactttgcacgtgcaattggtgtacctcgttctattgaagaggcagcagatattatttgcgaaggaaaaacagtgccattagaccttggtagagcgaacgatacatattttattaacatcgctggtggcggtcgtattacagaattaacatacgaagtaccgagtaagttaaagacagtattaggacaacttgcttattacctaaaaggtatcgagatgttaccatcattgcatccgacatatgttgaaattgagtatgatggaaagttactacaagaagaaattacgatgtttttaattacgaatacccgttcagtaggtggatttgaaaaggtagcaccgtatgcatctattaacgatgggttatttgacctattagtactgaaaaaaggttctatcgctgatttaattaaagcagcaacacaagcacaacgtggtgaacatattaataatccaaaagtgttatatacacaagcgaaccgaattaaagtacattcaccagataaactaatgattaatttagatggtgagtatggtggagatgcaccgatggaattcgaaaatatatatcattgtttagaactatttgttcctgaacatcaagaggatgccctgtaaaggcatcctttttactttgttaaaatgaattgtaaattgggagttagtttgatttttatggtatttttacaattcttttattttacatccatactttattgatacactggaagagataagaaatgagaggtagggtgctatggagaaggtaaaggcgatattatttgataaagatgggacattaatggattttcattcaatatggataaaagtagctgaagaacttgtagctgaatgtataagtttatatcatttaccaagtacaatgcggcagaccttattagaagagattggtgtagagggagcatttgttaatccgaggagtgcaatagctgctggaacaagccttgatgtagcgaaggggctttgtaattatattgagtctgctagagaagaagagatgcatcattgggtaagtgagaagttattttcccttatgtatgagcatcgttcgcatatgaaaatgacagcagatttaccgaaagtgttacaggcattaaaagataaaggatttatattaggggttgtcacggcggatgatttcgcaccaacagaattatttttaaaacaatataagttggagaacttttttgattatattatagcctcggatacattccctgcgcaaaaaccagataaaaagattatagaagtgttttgtgaaaaatttaatttagcatcatgtgaggttgcggttgttggagatacgccaactgatttacatttagccaaaaatggcgattgctatgcaattggggtgctatctggtacgggagaccgtccaacattagaaccacttgctgatttagtgttagattctgttggagagtttatttctcaatcgggtgagtttttctgggagaaagaaaagtctaatgtgtaaggaaaataagtctataaagactcttaatgagtctttatagacttattttttatgcctggatacaaagaatataggataaatgctagaaaagaaagttggcatacattttgcaataaaaagagaaaacaatgtaaagaaaaggatggggtacgcaatgaacacaaaaaaatttgctaaagtaaatgaacaaattccaggaccgaaagcggcatctttattagaacgccgtcaaaatatagtaccaaaaggagtaagtaacggcatcccaacgtttgtacaatctgcaaatggtgctcttgtaacagatgttgatggtaatcagtacattgattttgcaggagcaatcgggacaattaacgtagggcattgtcatccagcggttaaagaagcgctccataaacaagtcgatcaatacattcatactggatttaatgtcatgatgtatgagccatatattgaattagcggaaaagcttgcggcattggcaccaggaagtttcgataagcaagtcctctttttaaatagtggtgcagaagcagttgagaacgcggtgaagatcgctcgtaaatatacgaagagacctggtattatcgcattttctaaaggtttccacgggcgtacattaatgacaatgacgatgacaagtaaagtgaagccatataaatttgggtttggtccctttgctccagaagtatataaagcgccatttccatacgaataccgtcgcccagagggattaacggaagagcaatatgatgattttattattgaagagtttaagaacttcttcatatcggaagtagcaccagaaacaattgcagctgttgtaatggagcctgttcaaggggaaggtggatttatcgtcccaagtaagaaatttgttcaagaagtacgccgcatttgttcagagaacggcatcttatttgtagcggatgaaatacaaacaggctttagtcgtacaggaaaatattttgcaattgatcactataatgtcgttccagatttaattacagtgtctaaatcattaggtgctggtgtaccgataagtggtgtcattggacgtaaagaaattatgaatgagtctgcaccaggtgaacttggtggaacgtatgcaggaagtccattaggatgtgcggctgcattagctgttctcgatgtaatagaaaatgagaaattaaatgatagagcgatagaattaggaaaagtcgtaatgaaccgattcgaagagatgaaaaataaatatcattgcatcggcgatgtgcgtgggttaggtgcaatgtgtgcatttgaggtcgttcaagatcgtaagacgaaagcacctgacaaaacgttaacggctaatctatgtgcagaggcaaataagcgtgggttactgttattatcagcaggaacatatggaaatgttatccgtgtgttaatgcctttagttattacagatgagcaacttgaagaaggtttaacaataattgaagaatcattgcaagcttgttatgagcaaacaaacatcgctcgcgtttaaaaaatgaagtataaatagcaaacattctagctgactctatattaaatgcagaaaattcactttataataaaggtagtgaagtggatcgatggatttgaagttaggggtggctaggatggttgcagaaaaggaacgagtgttaatggatttaaaagatgtatttgaatatgcgtttgacgaaatttttgttacagatgagcaagggatcgttgtgcgtgtaaatagtacatgtgaaaggcactaccaactagctgccgaagagttagttggtaagcatgtaaaagaactacaaaaggatggaatcttttatccatcagcgacattagaagtgattgaaaaaaagaggccaattgaactcgttcaaactacaaaatcaggagagtatttacacgttcgtacaaggcctgtttttgatgatgagggaaatttaagaagagtgattagttattctcgggaccttactgaactctatcaattacgtcaaaaggtagaggaaatggataatcagctaaaaacatataaaaaagaattaagagaaacatatgagcatgaaggacttatttttaaaagtctagctatgcaaaaaatagtcgatacaatcaaaaaagtatctgtagtggatagtactgttctcgttttaggcgagactggagttgggaaaagtcgattagtacgccatttacatgaagtgagtcaccgtaagaatgaaagtttctatgaaattaattgtgcggcattgccaactaatttaattgaatcagagctttttggatattcaggtggatcttttacaggtgcgaatcgtgaagggaaaaagggactattagaatccgcgcataaaggaactctttttttagatgaaatcggtgaaatgccgcttgaaattcaagcgaagcttttgcaagtattgcaagaaaaaacatttcgtcctataggcggaagagaattaaaaaaagtggatgtccgaattgtggcggcaacaaatagagatttaagcgagatggtgaaacaaggaacatttcggaaagatttatactatcgtttgaatgtcattccaattgcaattcccccgcttagggaaagaacagaagatattttgccgcttatttatcattacttgcagcattttaataaaaaatacggacgtgatgtgaaactagcgccgagtacgttacaaatgtttgttggatatccgtgggaaggaaacaatagagaaatagagaatgtaattgagagaattgttattactgtcgatgatgttgtaacggtagaggatttgccactctctatgcaagaggctgcagttgaacaatcggggcaaagcctttataaaatgctggaagaggtagagagaaatattattcttaaagcgtataaaacgtatggatcaagttataaagtagctgagtttttgcaaattagtcaatctgctgctactaggaaaattaagaagttcatagaggaggaagaaaacattggataaaaaggcgactttcgtaagtatagataaaaaggcgatgtatataaatggtgagtggattacactacaagaacaaattgaagtaaataatcctgcgacgaaggaaatatttgcaactgtaccaaagggcggagtaacagaggcaaagcaagctgttgatgctgcacatgaagcttttaaaacgtggtctaagttaacggcagcagatcgtgccacgaagttaaaaaagtggttcatgcttattgataaaaataaagaagaaatcgcagcgattatgacgaaggaacaaggaaagccgtttgcagaagcgcttggtgaagtaaattatgcaaatagttttgttgaatggtatgcagaagaggggaaacgtgtatatggtgaaatgattcctgcttctcatccgaataagcgcattttagttatgaagcaaccagttggcgttatggcagctattacaccttggaacttcccggcagcgatgattacgagaaaggtagcaccagcgcttgcagcaggctgtacagccgttgtgaaaccggcgagtcaaacgccattaactgcattgaaattagctgaattagctcatgaagcagatattccaaagggcgtaatcaatatcgtaacaggtagtgcaaaagcaattgctgatacatggatggaagatagtcgcgttcgaaaagtgtcctttacagggtcaacggaaatcgggaaagagttaatggctagtgctgcacaaacgatgaaaaaagtttcgcttgagttaggtggccacgctccatttatcgtaatgaatgatgcagatttagataaagcagtagaagcggtaattggttcgaaattccgtaacgcaggacaaacgtgtatatgtacaaaccgagtattcgttcaagaagaagtatacgaagtatttgtagagaagttccaaaaggcagtagggcagttgaaagtaggagacggtttcggtgacggaacgactgttgggccacttattgatgagaatgcagtttcaaaagtacaagaacatattgaagatgctattcaaaaaggtggaacagttttatatggtggtcaaaaggtcgcagagttagagggacatttcattcaaccgactgtaattggggtggcaaatgatacgatgctttgtatgaatgaagaaacatttgggccagtggcaccagttgcgaaattcaaaacagttgatgaagtaatcgaacgtgcaaataatacaccatacggtttagctgcgtatattttcacgaaagacattagccaagcattccaaattagtgaagcgttagagtacggtattatcggtctaaacgacggtcttccatcagttgcacaagcaccattcggtggatttaaagaaagtggtatcggccgtgaaggaggccatttcggcatcgaggaatatttagaaattaaatatatttcattgggactataagtagtatactagaatctctataaggtaacagagaaggagattctagtatggtatattggctattattacttgttacaattatttttgaagtagctggaacaattgcgatgaaactatcaaatggtttaacaaagctcgttccaagtgtactgattttcgtgttttatggaatttgtttcagcgtgttcgccatcgttgtgaaaaagatccatttaagtattgcttatgctatttggtctggcgttggaacattacttattacaatcattagtgtgtacttttttaaagagcatattagtttatttcaagcattttgtattctttttattgttttgggtgtcattgggcttaaggtttcatcggcatcatgaaagctatcttttgtagaagatagcttttttctatttgtgcagttagcaattaatacgacaaaatatgacaagaaagcgtaaagcattttgttatgatacatatgaaatattgtcttatgtggaggaaagagtatgttaaaaaggtgagtcaaattgttttaatttttggcatagcttttagtttaagtgcttgcactgagactaaagatagtaatgaaagtaaacaagaagatgttcaagataaagtgtataaaataggggagacagtagacgtagatggtttgcaagtaactatcgattcagttaaattaggatatacggattatgatgaggataaaaagaaagaggagattttggggattattttcaaagtagaaaataatagtaaaaaggaaataccttttgcattttatgaatttgagattaccgataagaaaggtacaagatttaaagaatataataaccctgatagctttattagtaaaaagttagcaccagaagaaaaaattcaagatatcatgctatttgacgtagcgaaagaaaatacgtatatcgctacgtatagaccagagtttacgcgtgaaaatagaacaataaaatttgaattgaaaccaaataaataaagaaacacattggattatccaatgtgtttctttatggtaataaatttaaaacgcccagttacctttacggaagataggctcatgtctgccatcagcagtaataccgtcaatatcaagctcagctgatccaatcatgaagtcgttgtgtgtaatactagcgtttgcgccgttttcagcaagttcttctttagacattgtttttccgccaactaagttaaatgcgtaagcatttccaatcgcaaggtggcaagatgcattttcgtcaaatagtgtattgtagaataaaacatttgtgtttgaaattggtgagtcatgaggtactaaagctacttcccctaagaagtgagaaccttcatctgtttctactaaatgttttaaagcttcttcaccagcttcagctttatagtctacgatacgtccgttttcaaatgttaacgtgaaattatcgataatattacctgcaaatactaacggttttgtactagaaacttggccgtttacacctgttttaagtggcattgtaaatacttcttcagttggaatattagccataaatggtacgttcttttcatttaagctaccagcaccagcccatacatgtttttctggaagttcgattgttaaatctgttccaggacctgtatagtgaagagctttataatgcttttcgtttaagtaatccacttttgtatgtaatgtttcatcatgttctttccatgcttctacaggattttctaaatcagcacgagtagctttgaaaatagcatcccataacttggcttcttgttcttctggcgctacgtcagggaatactttcgcagcccattctttcgtaggaacagaaatgacacaccagcttactttatctgcttgtacgtaatcacggtatactttcattgcttctccagctactttatgagctgttgcgatacgcgatggttctacaccttttaataaatcagggttttctgcatagatagacataaatgcagcgccttcttttgctaattcttcacgagcatgtgctttccaagatggaaattcagcgaaagcttcttcaggagctagatcgaattttaagcgtgttaacgtctcatcattccaatctacatatacgtgttttgcaccagatttatatgctttttctgtaacgaggcgtacaaattgtacagcttcaagaggtgcactaattgataaagtttgtccaggttgaatattaacaccaacattaactgcaagagcagcatatttctctaacgtttgttcaaatgacatatgtataatctcctttaatttgaaagatttcttactatatataatacaagaaaattctaaaaatatatataaatataaagtaaaaagagagctcaaaatgtgttgagcccttatatttacttaattgaagaagcaaactgctctacagtcgttgtatggtgtatacgaacgcgcttcatctttaacaattcatcaggttcacccttcgtaatgaattgcccaggctttgtcgtcgtcgcaaattgataatacttcttcgtttctgcaacaaccttatcatctacatgaccgaatggataagcaatcgcgataacaggcttacctgttattttttctagcttttcttttgaaccttttaactcttcctcatagtttgtaattttcggtaaatctgcatgtgttgcagtatgagattgcaccgagaaaatgccggaatcaaccatttcttttatttcagaagtagacaatgctccttctacatcaacgttatcaacaatcatatattctgttgctgccggtttaaaagtatcatcttttagcttttgtaaaatgcgaaatgcattcatattatttttcataccgtcatcaaatgtaacgaaaatcggtttatttactttatttatatcgccccagcgttcaaacgttaaaagcgtataaccattgtcctttaaatgtttcatttgtgcttcaaagttagctggtgatacgaataagtctttaatgccttgaccatgataatcatcaattgcgtgatacataagaacaggaaccttttgttcgaaagtaatagtagatttcgtaagcgggattgttttcccatcttctttcattcctgttgcttcaatttggaactcaccgcgttttccttcaaattcctttatatcaaaaggaagtgtgaattgtttctctttttctttagaagaaaaagatttagcactttccttgccatcagctgtgcgccaaattttatattgtacttcatttaaagaatcttttatgtctgtaatatgaatacttgtgtttgtagattcgtgtgtaactgaattatatgagattttaccttgttcttgcacagtctcttcttgtttcttaatcccttgagccgttttctcttttttaggttctggacttacattgttagtattacagcctgctagaatggcagacgtacataaagcaattgctgcgtattttctcataaaaatcaccttctattgtgtagtatgttgcatatttatattaaaatccccaccgctataagagtggtggggatatacccttgttcatcatatcatttgaagaaaatgaggggaatatgatttttaggaggttattaatgtaatagattagtgactttgaatagatgtgtttttttgtttcttattagaattaataataatataaccgactacaaagataagaggaataatgaagacatagataggcattccccatacataatagcttttcagggttaagactagtaaatgtaagaaatcgaaaagggcgtgaattttcataaggtcctccaatgttttttacaaattataacatttaatgcttgttatttgtataatttggaaagtaatttaagctaattttaaagtaagaagaagacttattaatatgcaattttgcataaggatatgtattttattaaaatataaagattttatactataatgaaaaccgctataaaactaagtaagaataatgtatggagtggagaatagaaatgaaatataaaaaaataatatatatctttttcatatcgctatttatagttggttgtcaaagtgaagtgagtaaagcaaatagtgtggaagagtatattccatcgcatcttatgaatgcggaagtgacggcggatattatgacacttgaatttccttatgagataaaagagaaattagagaaaatcggaaataaaatgagcgatagtattacaaataatttagattggtatttgaagtatgccgaagaagaaattataccgaaaaaaacgtttccttatcatcaaaacttaggtattacaaaagaagaatatgattttatgatagataaaatggataatgcagaatatataaataccaaagacggaaaactcttttttaaaaagaaagatcatgaaattcaaattctctctgatgaaaatttgaatctaattaaaaatattcgaattgatacagagaagaatacaattaaaactcctttgggagaatgcgaatatgaaggtgaaatcaaggcgtcggatgaacaaaaagctactggtccatggagtgggaagatgtggactttaaaaagtaatggattgctttatcatttttcattaggaaagttaaaaaacataaacaaatctatcatttacatttcaataaaaggtatatataaagataggattatcaatacagaagaagcagttgaatttcactcggtttcataaagaatcaaaaaaatcaccttactcgttaaagtaaggtgattttttattaaataaacaatccagcgattgtcgcagataaaatagaagcaagtgttgatgcaaatagcattttccaaccaaatttagaaacaacgcttccttgtttttcagaaagggcacggattgtaccaacgattgcaccaatttggctaatacttgcgaagctaattaagaatactgtaacgattccaactgtacgtggagctaatgttgtagctgtgtcttttaaatcaaggattgctacaaactcatttaaaacaatcttcgtacccataataccaccagctgggataatatcttgagttggaatacccattaagaatgcgaatggagaaagtacgtaaccgaagatttgttgtaaagtaatggcatgtcccattgcgcctgaagctgcactaattacgtagtttacaacttccatcacaccgataaaggcgatcattaatgcggcaacgataccagctacttttaaaccatcaagcgcaccgttaatcattgcaccgataaagctgtccccgaatagcgttctatcaaatttttgaatcacttcatcttctttcttcgtatcaactggtgttaataacgaacaaacgattaagcttgagaataaatttagcggaagagctgctagtacgtattttgcatctaacatcattacgtatgatgctgtaacagaagcagaaacggagctcatcgcagaacaacaaatgataaacatacggtttttattgaaatgctgtaaatcgtttttaataacgattaatgcttcacttgaaccgaagaatacagagtttactgcgtggaatgactcaacgcgtggtaaaccagtaatttttgaaatagcaccgccgacaacgcgaacgatgaatggtaaaacacctaaataactaaagattgaaagtagtgctgagaaaaatacgataattagtaatacgtttaagaaaaagacaaaatctctgtgaattccattaaagagaaaatcgacacctgtcgtaccaagtttaattagtttgttgaaaactttactaatgaaaataatgatttgttgaccaatctttgtagcaaacataaaccaaccgattaaaatttggaaaccaatcataattgcaattgcacggaagttgattttacttttgttgtttgacaaagcaaaacataaacctaacacggcaagaataccgataatgctcattacatattgcatgtagttgcccctttcagaagttcgtataaagtttgtacataaaacgctcgttatattactaaaaataaaggaatgaggttttatgtcatacgtaagatgtctgaccttttagaaaaataaaaataaaaaaagacccatatggattcactttcatctatgagagaaagctaatcaatatgagtccttttttgcgcataggctaatattcattagttttccccatagtccagcaatttaaggttgctgggtagaaactctcgatccatattatcaagtatatatgaggtaacatcgtccgtattaaattagtagtagcgtaacattaacagagaactatcgtcaatagctttttttcttccaatagaaaaagaccatataagtatgataaaatgtaacgcagtgttatgaaaaagagaggtcggaaaatgagtactaaaatgacgccaccagttgagaaaaacgagtttatagatgtagtatttgaagatttaacacatgatggtgccggtgttgcgaaagtaaagggctatcctattttcgttaaaaacggattaccaggtgaagaagcgcaaattaaaattattaaagtgaagaaaaacttcgcatttggtcgtttaatgaagcttcatacagaaagtccatatcgtaaagatgcagaatgcccagtatataatcagtgcggcggttgtcagcttcagcacttaacttatgaaggacaattacaggcgaaagaaaaacaagtacgtgacgttatgcagcgcattggaggactaggtgatgttcctgttcatcctgtacttggcatgaaaaatccgtgggtatatcgcaataaagcacaagtaccaatcggagaacgtgaaggcggacttgtagctggtttctatcgccaaggaacgcatgacatcattaatatggaatcatgcttaattcaggcagaagaaaacgatacattaatccaagaagtaaaacgtatttgtgaaaagcacggtatcactgcatacaacgaagagcgtaataaaggaacacttcgtcacgtaatggctcgttacggacaagtaacaggggaaattatgcttgtcttcattacacgtacagcagaattaccgaacaaaaaagcaatcattgaagaaattgcagcgaaattcccagaagtaaaatcaatcgttcaaaacgtaaatacgaagcgtacaaacgtaattttcggagacaaaacgacagtactatacggatcagaatatatttatgactttatcggggacattaaatttgcgatttcagcacgttcattctatcaagtaaacccagaacaaacgaaagtgctatacgataaaacgttagaatacgcaaaattaagcggtaacgaaacagtaattgatgcctattgcggaatcggatcaatctcgttattcctagcgcaaaaagcgaaaaaagtgtacggtgttgaaatcgtcccagaagcaattgaagacgcaaaccgaaatgcagcactaaacaacatgacaaacgctgaatttggggtaggagaagcagaagtagtcattccaaaatggtacaaagaaggcgtaattgctgacacaatggtcgtagacccaccgcgtaaaggctgtgacgaagcattactaaacacaatcatcgacatgaagccaaaacgcgtcgtatacgtatcatgtaacccagcaacattagcacgtgatttaaaagtactagaagaaggtggatataaaacacaggaagtacaacctgttgatatgttcccgcatacgactcatgtggagtgtgtggcttggttaaagcttgaaatataggggtttgatattaattgttgatggggttgaccacaaaatgaccacatcaacaatttttttatgattttaacgcctcacttagcgctatagtggcactttcttgcatatctaatgtaacatgactataggtgtccaatgtggtcttaatggaattatgtcctaatcgttcacttacgattttcggattaatacctaatttaagaagaagtgtggcatgagtatgtcgtaagtcatggaatctaattttaggcacttgtgctgtttttataaacctttcaaagacagtagttaatgttcttggatagattggtctaccatcttctctactgaaaactaagtcattatcttcataagctttaccgatagctaatttaaattcattttgttttgctttataactttttaactctttacataagctttgatcaatggaaattaagcgtttagaacccgatgttttcggttctgtatatcgaaatcctaattcatcgtaaattagagtttcagtcacactaaccttaccttcaactaaatctacatttttccactttaagcctagcaattcacctctacgcataccggtattaagcgcaagtaaaaataaatgatagtaaataggattgtcaaatttagcgtatgttaagaaggttttcgtctcctcaattgaccacgtattattgaccacttttcgtgggcgagggatttctacatgttcaaacggatttttatataaaagttcccatttaacagcatcttctaatgcaccttttaaaacgataaaaatatactcaatatatttaggagataattcgtcatcgattagcgatttaacaaatctttgtccatgtagaggttttaaatctttcagtttatgcgaaccaactacaggaataatcctactgttcacagctcttctataattaatgaatgtagaatctctcactcgttgcttagctgtgttttcaagccactcctgtaaatattcactgagagtaagatttttatcatcaactagactcccagtattaaactgatgaataagttcattacatgctctttcggcttctttctttgttttaaagcctgatactgttttttgttttctttttccagtaagaggatctcttccaatatcaattgtaaatgaccatttttcaccgcgttttctaaaatatcctttcattatccatacctccttgaactaatagtattcgaatagcacaaataattccagtattagaaaaaggaaatagacacccattcgagtgtctatgtggtaaaatatatgtatccatacttctgagcccacataatttgtgggctttttttattggtacaaaatcagtattttgttaaatcattatcatttgatgtactattgttcgcttctttaatttgctcagatttgttttttatatcttcagtaatggcaatatcaatattcccttttgcttttttgtattcctgtagtaaagaattaacattttgattaaatgagattaaactaccagttggagagttcacttgctcattaagtgccgttacgatgctatatatctttttatattcatcgtaaagttccttatattgttcaggttgttcttttgcagctttagagataactttcagttgttgtcccatctctgagtacaatagttcagcatgtttaatcattttatcagactctgttttttttgatattatctccacattaaaatcttttctattgttaattgcctcagaccatgtagttgaatagcctgataacacagttgttgagaaccattcaaaagaatcgatgtcgttataaaaattcgcggctgccattagatattcgctttcttttttctgttccagagcaacggccttatgatcattttcgatccccattgtaataaaaataattacgaatagcactacaaaagaaacaatagatgttccgaaagatattgcagatcttacgaataatggttttgtctcattgtttttcttcttattaatgaatcctataattagaaaaactaatgcagctataagcgcaataatactgaaccaggctaaagttcctcctacagcttgtccaaaaacatatcctattccaaattctgagtctccaagcttaatgctattatagagtcctctaataaagagtaggattattatccctatactaattaaaataaacattttattagaaattttcattcttaatcctccaaaaatataaaatgtaagatttctgaagttagcatagcaaacaaaatattaataacttgtcatattatgtcgaatgaacaaataaaaaagagaataaatagctttcttactcaaattgtcattgttgataataattcaatctcttattgtgaaaaaaacagaacaaaggttcgctttttgtggtattatatctataaagtataaaaataacgatatgaaaaattgcatatgtaactaaatcttgatttatagcgataaaaaaactttctcaacatttgattaacaattattttattaaaatttttaaaattcgtgatagtatggaagtaactaaaaatgaacgaaaaaagacccatatgagcgtgttcaagaggtgtctgctaaacgttctcttgaaccgttccctaaccagtacttaggaaacactttgctacatacgagtcacaactaagtataacataaaaaataaatattctcttctcgtattttgtttccaacttttttgaattgttaggtggtgtccgtgttcgggaaaaggaagtgtttctagtgaagagtttaatgaaactaataaaggagcgaataaaaaaagaagaattaacgtttcctgacttagaaagaaaaaccggagtagatcgtgtagtgataaatgatgcgatcactggaaaaacagcagaaatgaaattcgagaattttttgtgtgtggtatctgaaatatacagagatgttaaagaaagaaataagataatcagacaatttattacactatgtaaaaagaatctaaacgttaggaaggctttgtgttattgccaaggaactggagaatatgaagtaatagattatttagttaataaacatagtaattgtaagttgttaaataaatatttgaaagcgtacaaattgtttaataaaagaaatcaggataaaaaacgtggacagcctttattggatgagattaataaaaaggtatttcccaatgatccagaatgccaagtagttattaatattctgtatgcattgtcgatgcatgatatttttaatataagggcaatgaatccatatttagataaggtagagaaaaatttagtagagattaaggatggatttataagaaattggcttagtatgtattttaatgaacgtatggcctatgtgaatttatttgatgataaattagaaatatgtagagagaaatgccgtaaaatattagataacgaaatggaagtcccaataaccaaagcaactgcattgtgctgtatgggagaaagttatatgttcttggatgtattaaaatcagaaaagtatttattggattgcataaagtatttagaggacaatggcataggaagagaaagtcgaaaatataaatcattccaatctactttagcctttctttatatagataatggatttaatcttgataaaataaaatttgaataccttgatacatctgaaataggatatttcgaaggattatatggcgacaaaaataaagcattaaaaatatttaaacagttagctgcagaaagaaaaatggattctccattcacaatgtactatatttccagaattaacaatgatatactgggattaagggaatctttgagacgttttgagcgtgttggtaattatcattatgctaacgcggtgagacgaacgttagctagtatagttgaaagagtgggatgaatatgaaaaaagctagtatggtagtattatctattctgactgtaatgactttaactttaaatgttagtggagcaacaaaggatagtaaaagccaattatctaaacatgaagtacaatatatgatggttgaaccaggtggttcttaaaaattaaaataacaatgaaaaaagagacgttgcgtaaatcgcagcgtctttcgtactttttagggactgtaggttttttattgacggcaaaaaaaccgacacctatttttttccaaacgtcatttttataaagaactaacggttattataatttgctataaagagaaactctaaaaattattaaattacaaacaaaatatacagagggtgtagggggaaattataatggtaaaagagcaagtagcaaaagaagcggcaattaagttgttattagagggaaacactcccaatactgaggaacaattagaacacttactagacggtttatttaaaataaaaaaagactaaccacagaggttagctttttttatttttgttctttgttttgttgatattgtacatacatttctaattgttcccaagcttttttctgttcttcttctgataatttagagatcagttgttcaatctttttccccattgcggttgcttgtttatcctgttctgcggttaatctttcgtcagtggatcttcctaatagaaaatctacagatactttataaatatcagctagtttagataaagtatcataatctggttttcgtctcccggattcgtaactagaaagagtcccacggtgtatttctagtttttcagttatatacgtttgtgtatagccgcttttttcacgacaggctctcaatctttctcctagagtcataaatttattcccctttataaataaatttctatgtgtgagttacattacattcgaattgttgttaattacagtatatatactttctgacgactttacactgttttttatcaatttgataaaaaaaatataacaaaatgacaaaaaacatgtttacttcttcagaatgacgacatataatgaaaataacaaatcgtcaaaacgacgacttggaggtgaaacatttgtctataggcatgagaatacgtcatatacgtaaagaaaagaaaataactcaaggagaattagcaagaatgcttggctttagcggttcttcagctatttcttatatcgaaaatggtcagcgtaaactaaacgccgataaaatacccaaattagctgaaagtctaggcgtaactattgaagaaatttttttgaatgaaagtcgtcaaaatgacgacaaagagggagaggatgaagaatcatgagaaattcaacagttcaaatagcattatcacttacaaagttttcagcccaaaagggatggagggatgaagaattttgggaggctattgagttacttcgcttcaataaagaagatgaaagacaaacaactgtagaaaagttagatagcattccagtcactaatgatagcgcgaacgattatccgcttatgttaaacgtaaaacacgtagaagaaatattaggagtagcgaaaagaacagcttacggcattatggatcaaaagggttttcctttagtgaaaattgggagaaagaaagtagttcccagggatgcattctttaattggatagaaaagggggtgtcagcatgatggaagatacaacatcgctagctttattcgcaatgtttatcgcatgcagtgcgtggtcgctttacattacttacgagccgataaaacgttgggcttggagtgatgtagaacaaaataaaaagacccatagcagtgggtcctttaagaaaaacaagttgttataagtataccacggaaagtagggaaatagtatatgaattcaatcgaatatcaagtgctattacctaataagttttgggacttagcagatagtcaagatcaattaaagaagatgattgatcagtatttcaaggttggttatccgcattatgaaattcaacgaattatcaaaagtgggcaagcatatgtggcagtttgtacgaggaggtaaataaatggcaacgtttcgagttaataaaagtaaaaattacacaaccattaataatacaggtcttcgtgacgaacgtttaagttggaaagcgaaaggaatattggcttatattttatcattaccagatgagtgggtattttacatggaagaaatagcgacacacgcgaaggataaaattagtagcttatattcaggaatgaaggaacttaaaaagtacggttatgtaaaaaggttccctgtaaaagatgaaaaaggaaaaattattaaatgggaaacaatcgtttatgaagtgccacaagaggaaaacccatatgtagaaaatccacaaatggacattccacatgtggagaatccatatatagaaaatcaaacactactaagtactaataatttactaagtactaataaacaaaatactaatatacaaagtagtagtagcatcttctctttttacgaaaataatttcggcattttaaattcattcatagccgaaagtatttcacaatgggtaaacgatacaagcgaagaacttgtacaagcagctatggagcgtgctttgaaacagcagaagaaatggaattatgctgagggcattttaaaacagtgggttaataaaaatattcgtactttagctgatgttaatgcagcagaaatagagtttaaaaacaaaggtaaaaaaggagagaaaaacaatgcaagcgttaggaaaaacagtagcttcatcgaaaaatacgattttgagtaaatttgctcaaagttatgtgttgtctcctaatagatgtacaaatgttttcttggtcggtaaagacaaaattaaagacgtttgtaataaacgcttacttatagatacaaaaacaaatgaagagttttgtccacaatgtagatcggtagagcaagaggaccagcaacttgcaaaagaaacattggctattaaaaagaaaaacgaaattattcatttatacgattcgttttcagataacagccttattaatcctaaattgaaaaaagcaacatttgatagttacgcaccacctacacaggaattagcaaatgctaaagaagtaatgatggattttgctagaaactttgaacctaacaagtcagaaagcattgtaattacgggtgactatagagttggaaagagtcatttatgtgtagcggctacaaaagaaattatgagaaaaggctatagcgcaatgtttatagaaatgaacgctctcttcacaaaaataacatctacctggaataaaaatagcgagttaacagaggacaagctaatgtctattctcgcaaatgtggatgtacttgtattagatgattttggagccgagtttacggaaaaagatgctgagggagttacttggaagaaaacgaaaaccaaggacattctagagcgtaggctaggcagaacaaacttatttacaacaaactttggagttatggagttagcaggaatgtacggagagcgtgagtttagtcggattatggaagatactcaagtgttgaaaatgaacggtgaaaattacagtttgcgaaacttcaaaaaggaggaataagcatgtgtgtattatgtcgtgataaaggaattattcgtaaagaaatttatccaggtgtagctctaacggaagggtgtaactgtgaggtagcaaagcagcagcaagaagaaaacgataagcgttggcaagcatggttaatcaaatttgaatcaatgaaacaagagttgaaacggaatcaacaacaaaaagttagctaaaaagggggagaaagttatgaaaaacacaggtgtttcaagaaaagtggacgagctagggcgtgtggtaattccagtagagttacgcagaaatttaggaattgttgaaggtacagcattaggatttcatgttgaaggggaaaacatcgttttaaaaaaacaggataagtcatgctttgtaacgggtgaagtttctgaatcaaacatagagttgctagagggtcggatgtttttaagtaaggaaggtgcaagtgagttgctgggcgctattgagaagagtgggattgtaaatgcctaaacaattaaatattttcgatgtagaaccggaaatttgtcagttcgatgtaatgaaggccaatgttaagaaaggaactggacgcaatacatacgctgatgtacgcgtccaagttccaagaaatgcaaagggtacggatgaattaccacgcacaactaaacaagatgatcgttatgacatctttgaacaatatgtaatggcaatttggagatttcaaagggctgtagataagtttttcaattgggatacggctgaagaattgtgtaaggcagcaagggataaaaaagaaataattccggtaaggatttacttaggaagtggattcaaacctgatgttgtcgagtacatgcggtagtaaaagggagagggacatatgaaaaaaatagaaattgatgttagcagcaacaaactttatatagtcaaggacgggaatgttacggcagttaacccgccaatcagtggatttggtgagcaagtcgcagtatgggttaacggtaaagtggatcgagtggatactaagtttactgaaaagataaaataatcatttttagaaagtaggttcgcttatgagcgtagcaagtaatcatgaagcgatgaaggaatcaagattaaaaatttacatcgctttagaggaagctaactttatttgggatgaaagagatgtaattcgttttcgtgaaatgtggaaacaaggtatgagcttgccaaagatggcaaaagcgttaaggaggcaccaagcggaggttgcgctccttgtgatagaccaagctgatcaggaattaataacaaatcgtccgataggattaggaatttgctaaataggaaggggaaatcaaaatgaacttaactaaaatattcggaatgcaaaaggtattagatacaagaatcattaaggagcatggattggaaggacaaaatttattttacaatatgatccttgctttacaggtggaaattggagaacttgcaaatgaaacaagatgctttaagcattggagcaataaaggacctagtgaaaaagaagttattttaatggagtatgtagatggatttcattttatagcttcactagggaatggcatcggatttaatcctaatgaatatagcctgaaattattagaacataatgcaaacgtctatacggcaagtacgttagtcaatcaatttaacaatgtatatgaaggtatatcggaatttcgtgcaactcaagatattgagctttatgaagaattattgtactcgtttttagggttaggtaagaaattaggattcacatttgaagaaattgaacaaggttattacaaaaagaatgaagtgaaccaccagcgccaggataacggatattaagacaaaatttgaattttattagaaaaggagaatgagagatatgccaaattggtgtgaaggtacttttaaagttagaggagcaaaagaggatgttagaaagtttttattggaagcactaactcctattccaaacggattctttgaacaaacgcctgtggaaaagatcgtagaggaagatgagtatgaaatcttcatcaagtcagaaaatgcttttcatattaaaggaacacgtcggaattttatagagagtaacattcaacattattttgaagatgatgaagataaattagaaatatgcgtactggaagattataaggcggcttggggcatagatgcagcaccattagcaaccttgtctaaagagtacaacgtggatataaaaatttatgcgtttgagaaagggatggaattcaaccaagatgttgagattcataaaggcgagattattaagaacgtagagattgaatttgataattatatgtgggaatgcatcaatcctaatatgggcggatgagaatcaaacaaaagcgttattttaatcgaaaaggggaattagagatggcatacacaatcgttaaatacgatatggaactatggttcgatgagaataaagaagcggaagttataaaagtagtagattgtgatttggcgataagcactaacattatgatagatggtaaagtttatcacgtttgcgcaaaatacccaaaaaataatttgatcggtgttagagaaatacaattacagtctaaaccagaagatgtcgaatatgaagaacatttaacatgcccttattgtggcgagaaggatgtagatgcctgggagcgttcgcaagacaatgacaaaattgattgtagtatgtgcggttctgaaattgagtattcaagagaagttgagattacatattcgactaaacctatcaaaagaaacaatcctataaagctttaaccaaagcattattttaatcgaaaaggtggatagatatggcatacaatcacgctctatacacgttaaataaagagaaaaagagattggaagataaaatcgaggatatagaagatcacgttttatatcctactaataccgaacgcatgagaagatcgatgataaaaatgttcgaagagcaattgaaaagtgtaaacgatggaataaaaaaactgggggaatcgggaaatgaataaggacattcaatttttaaaggaattgcagcaggaattaaaaacacaggaaatcgattgccaagcatcaccacgcttttggactttaatggattataaatgggttgtaactgcagaagggtaccacgaaagaacatcattatactttgttaacgattgtgaagctgtaattgtcgatgaatacgtaaaagaaattattaacgatgaaattgaacatgaacttactgaagaacagattgaagacttaaaagaattgcaagaatacgcttctgaatacgacctagttgagtggattaaagaaaacatcgatgaagattgccatttagtatacgaaaaggaagaagcattcattgttgaaaatacgatgttcttaactaaagcggaagctaagaagcacatagagttaaacaaacatcattacacaagcaaggtccacacatacgctatgacggcatggcgggcgccaaaagtggaacgattgttgaatatattagaaacatttgattgggagtcaattagtacaaaatagttattttaacacgaaagggagaatgagagatggaatggatgtacaaccttactggcaatgaaatttggacaagtgatcgctttgctactaaagaagaggcgattgaggcagcgaaggaagaaatgaatgaacttgaaaaatatgatggagttccttatggagataacttttcaatcggacagataagtgattatgtgccatatgttagtgcagaagatgttattgatcaagttactgtaaatgcgtatgaggcatgtggagaagtttcagaaagctggttatctaaacctagccaagatgaaatagacctacttcagaaaaagttagattcaaaaatcagcgaatggctaaaagaaattaaggaatatcctacatttggccagatagttaatatcgaagtagttaatcgttaatttataacaaaattcttattttaaacgagaggggaaaataataatgagatattttgagtttgataaacatgattattacgctttgatggcagttaaagatggtggggaagaaaaagcaatcgagctatatgttgaaattgtagctggggaaagcatcaaggaagtagaggaagaaggtttaccagtagagatcacgcgtgaacaggcactatcaaagtatttagatgtaatgggtagggatgatatttcagaatggattaaaatgtttgatcaatgcgaaaaccttccgttgttaattgatggaacattagtttaaacaaaatttcttaattaatcgaaaaggaggtggcaataagtgaaatttttagttttaaaattcgatgatattttaaaaatgacatccgcgaacgaaagggatattttagaggggatttcacgaa
